(19) United States
(12) Patent Application Publication
(10) Pub. No.: US 2024/0101984 A1
(43) Pub. Date: Mar. 28, 2024

(54) COMPOSITIONS AND METHODS FOR THE TARGETING OF SOD1

(71) Applicant: Scribe Therapeutics Inc., Alameda, CA (US)

(72) Inventors: Benjamin OAKES, El Cerrito, CA (US); Sean HIGGINS, Alameda, CA (US); Hannah SPINNER, Boston, MA (US); Sarah DENNY, San Francisco, CA (US); Brett T. STAAHL, Tiburon, CA (US); Kian TAYLOR, Atlanta, GA (US); Katherine BANEY, Berkeley, CA (US); Isabel COLIN, Oakland, CA (US); Maroof ADIL, Davis, CA (US); Cole URNES, Los Angeles, CA (US)

(21) Appl. No.: 18/168,426

(22) Filed: Feb. 13, 2023

Related U.S. Application Data
(62) Division of application No. 17/483,692, filed on Sep. 23, 2021, now Pat. No. 11,613,742.
Application No. 17/483,692 is a continuation of application No. PCT/US20/50000, filed on Sep. 9, 2020.
(60) Provisional application No. 62/897,941, filed on Sep. 9, 2019.
(60) Provisional application No. 62/945,138, filed on Dec. 7, 2019.
(60) Provisional application No. 63/074,375, filed on Sep. 3, 2020.

(51) Int. Cl. C12N 9/22; A61P 25/28; C12N 9/06; C12N 15/10; C12N 15/11; C12N 15/113; C12N 15/86; C12N 15/90

(52) U.S. Cl. CPC C12N 9/22; A61P 25/28; C12N 9/003; C12N 15/101; C12N 15/1051; C12N 15/11; C12N 15/1133; C12N 15/86; C12N 15/907; C12N 2310/20; C12N 2750/14143

(57) ABSTRACT

Provided herein are CasX:gNA systems comprising CasX polypeptides, guide nucleic acids (gNA), and optionally donor template nucleic acids useful in the modification of a SOD1 gene. The systems are also useful for introduction into cells, for example eukaryotic cells having mutations in the SOD1 protein or the SOD1 regulatory element. Also provided are methods of using such CasX:gNA systems to modify cells having such mutations and utility in methods of treatment of a subject with a SOD1-related disease.

### CROSS REFERENCE TO RELATED APPLICATIONS

[0001] This application is a division of U.S. patent application Ser. No. 17/483,692, filed Sep. 23, 2021, which is a continuation of International Patent Application No. PCT/US2020/050000, filed on Sep. 9, 2020, which claims priority to U.S. Provisional Patent Application Nos. 62/897,941, filed on Sep. 9, 2019, 62/945,138, filed on Dec. 7, 2019, and 63/074,375, filed on Sep. 3, 2020, the contents of each of which are incorporated herein by reference in their entireties.

### INCORPORATION BY REFERENCE OF SEQUENCE LISTING

[0002] The contents of the electronic sequence listing (SCRB_009_05US_SeqList_ST26.xml; Size: 16,004,025 bytes; and Date of Creation: Feb. 10, 2023) are herein incorporated by reference in its entirety.

### BACKGROUND

[0003] The wild-type SOD1 gene produces the enzyme SOD1 (superoxide dismutase 1; superoxide dismutase [Cu—Zn]), which is abundant in cells throughout the body. SOD1 binds copper and zinc ions and is one of three superoxide dismutases responsible for destroying free superoxide radicals in the body. At least 170 mutations across the SOD1 gene and its regulatory element have been found to cause amyotrophic lateral sclerosis (ALS; Lou Gehrig's disease) (Pochet, R. Genetics and ALS: Cause for Optimism. Cerebrum May 1; 2017. pii: cer-05-17), and with the exception of the recessive D90A mutation (Andersen et al., 1995, Nat Genet 10(1): 61-16), they are inherited in a highly penetrant autosomal dominant manner. Most pathogenic mutations are missense mutations, and nonsense and deletion mutations have only rarely been associated with disease (Fox, F. and Yamamoto A. Autophagy: Cancer, Other Pathologies, Inflammation, Immunity, Infection, and Aging. Volume 7: Role of Autophagy in Therapeutic Applications. 2015, Pages 117-137).

[0004] ALS is a neurodegenerative disease characterized by selective loss of motor neurons and is characterized by progressive muscle atrophy the inability to control movements. The pathology of ALS is characterized by abnormal accumulation of insoluble and misfolded proteins in degenerating motor neurons. Neuronal death results in progressive paralysis, which typically is fatal 2-5 years after the onset due to respiratory failure. Only about 5-10% of ALS cases are familial, with a Mendelian pattern of inheritance, and the remainder are of spontaneous, or “sporadic” origin. At least 13 genes and loci of major effect known to contribute to familial pathology. Of these, toxic gain-of-function mutations in the SOD1 gene have been most extensively investigated (Petrov, D. et al. ALS Clinical Trials Review: 20 Years of Failure. Are We Any Closer to Registering a New Treatment? Front Aging Neurosci. 9:68 (2017)). SOD1 mutations account for approximately 20% of cases of familial ALS and around 5% of idiopathic/sporadic forms of the disease (Kiernan, M. et al. Amyotrophic lateral sclerosis. Lancet 377:942 (2011)). The exact mechanisms whereby SOD1 contributes to disease progression are currently unknown. Examples of possible pathogenic mechanisms are the localization of mutant SOD1 to mitochondria resulting in caspase activation, formation of cytotoxic SOD1 aggregates that sequester other cellular proteins, perturbing their functions, and the selective inhibition of anterograde fast axonal transport resulting in depletion of mitochondria in axons (Stevens, J C et al. Modification of Superoxide Dismutase 1 (SOD1) Properties by a GFP Tag—Implications for Research into Amyotrophic Lateral Sclerosis (ALS). PLoS ONE 5(3): e9541 (2010).

[0005] With respect to ALS, virtually all known SOD1 mutations to date are dominant; a single mutant copy of the SOD1 gene is sufficient to cause ALS, for example. The mechanisms by which SOD1 mutations cause ALS and other SOD1-related disorders are unknown, but some are related to toxic gain of function (Sharma, A. et al. ALS-associated mutant FUS induces selective motor neuron degeneration through toxic gain of function. Nat Commun. 7:10465 (2016); Bunton-Stasyshyn R K et al. SOD1 Function and Its Implications for Amyotrophic Lateral Sclerosis Pathology: New and Renascent Themes. Neuroscientist. 21(5):519 (2015)). An additional cause of ALS is attributed to misfolded SOD1, in the form of small aggregates in the nuclei of glial cells (mostly astrocytes) of the spinal cord from ALS patients (Forsberg et al. Glial nuclear aggregates of superoxide dismutase-1 are regularly present in patients with amyotrophic lateral sclerosis. Acta Neuropathol. 121:623 (2011)).

[0006] Clinical trials with experimental therapeutics are difficult because of the complexity of the disease and its manifestations, making assessment of efficacy problematic. Clinical trial endpoints that have been utilized over the past 20 years include the ALS Functional Rating Scale (ALSFRS-(R)); combined assessment of function and survival; time to death, tracheostomy or persistent assisted ventilation (DTP); forced vital capacity (% FVC); manual muscle test; and maximum voluntary isometric contraction (Petrov, D. 2017).

[0007] The advent of CRISPR/Cas systems and the programmable nature of these minimal systems has facilitated their use as a versatile technology for genomic manipulation and engineering. Particular CRISPR proteins are particularly well suited for such manipulation. For example CasX, has compact size and ease of delivery, and the nucleotide sequence encoding the protein is relatively short; an advantage for its incorporation into viral vectors for delivery into a cell.

[0008] There remains a critical need for developing treatments for ALS and other SOD1-related disorders using such technologies. Provided herein are compositions and methods for targeting SOD1 to the address the same.

### SUMMARY

[0009] In some aspects, the present disclosure provides CasX:guide nucleic acid systems (CasX:gNA system) and methods used to modify the superoxide dismutase 1 (SOD1) gene in a cell, the SOD1 gene comprising one or more mutations in the encoded SOD1 protein or in the SOD1 regulatory element. In some embodiments, the CasX:gNA system comprises a CasX protein and a guide nucleic acid (gNA), wherein the gNA comprises a targeting sequence complementary to a target nucleic acid sequence comprising a superoxide dismutase 1 (SOD1) gene.

[0010] In some embodiments, the disclosure provides CasX:gNA systems comprising a reference CasX or a CasX variant sequence comprising any one of SEQ ID NOS: 1-3 or a sequence of SEQ ID NOs: 36-131, 208, 210, 212, 214, 216-229, 240, 242, 244, 246, 248, 250, 252, 254, 256 or 258, or a sequence having at least about 50%, at least about 60%, at least about 70%, at least about 80%, or at least about 90%, or at least about 95%, or at least about 96%, or at least about 97%, or at least about 98%, or at least about 99% sequence identity thereto.

[0011] In some embodiments, the CasX:gNA systems comprises a guide nucleic acid (gNA), wherein the gNA comprises a targeting sequence complementary to a SOD1 gene target nucleic acid sequence. In some embodiments, the SOD1 gene comprises one or more mutations. In some embodiments, the gNA of the CasX:gNA system has a scaffold comprising a sequence of Tables 2A or 2B or a sequence having at least about 50%, at least about 60%, at least about 70%, at least about 80%, or at least about 90%, or at least about 95%, or at least about 96%, or at least about 97%, or at least about 98%, or at least about 99% sequence identity to a sequence of Tables 2A or 2B. In some embodiments, the CasX:gNA system gNA comprises a targeting sequence of Table 3 (Table 3 provides the gNA targeting sequences for the SOD1 gene; the table is provided in FIG. 33, and is referred to as Table 3 throughout), or a sequence having at least about 50%, at least about 60%, at least about 70%, at least about 80%, or at least about 85%, or at least about 90%, or at least about 95% sequence identity to a sequence of Table 3. In some embodiments, the CasX:gNA system further comprises a second gNA, wherein the second gNA has a targeting sequence complementary a different or overlapping portion of the target nucleic acid.

[0012] In other embodiments of the CasX:gNA system, the CasX molecule and the gNA molecule are associated together in a ribonuclear protein complex (RNP).

[0013] In some embodiments, the present disclosure provides gene editing pairs comprising the CasX proteins and gNAs described herein.

[0014] In some embodiments, the CasX:gNA system further comprises a donor template comprising a nucleic acid; for example a donor template encoding at least a portion of a SOD1 gene selected from the group consisting of a SOD1 exon, a SOD1 intron, a SOD1 intron-exon junction, and a regulatory element.

[0015] In other embodiments, the disclosure provides nucleic acids encoding or comprising the CasX:gNA systems of any of the embodiments described herein. In some embodiments, the disclosure provides vectors comprising the nucleic acids encoding any of the CasX:gNA system embodiments described herein. In other embodiments, the disclosure provides vectors comprising the nucleic acid encoding any of the CasX:gNA embodiments described herein and, optionally, further comprising a donor template nucleic acid wherein the donor template nucleic acid comprises a nucleic acid encoding at least a portion of a SOD1 gene. In other cases, the vector comprises a nucleic acid encoding a CasX fusion protein comprising a heterologous protein, a gNA, and the donor template. In some embodiments, the vector is an Adeno-Associated Viral (AAV) vector or is a lentivirus vector. In other embodiments, the disclosure provides a vector wherein the vector is a virus-like particle comprising an RNP of a CasX and gNA of any of the embodiments described herein and, optionally, a donor template.

[0016] In some embodiments, the disclosure provides a method of modifying a target nucleic acid sequence of a SOD1 gene comprising one or more mutations in a population of cells, wherein said method comprises contacting said cells with: a) the CasX:gNA system of any of the embodiments described herein; b) a nucleic acid encoding the CasX:gNA system embodiments of (a); c) a vector comprising the nucleic acid of (b); d) a VLP comprising the CasX:gNA system of (a); or e) combinations of two or more of (a)-(d) wherein the SOD1 target nucleic acid sequence of the cells is modified by the CasX protein. In some cases, the vector is an Adeno-Associated Viral (AAV) vector or is a lentiviral vector. In some embodiments of the method, the CasX and gNA are associated together in an RNP. In other embodiments, the method further comprises contacting the target nucleic acid with a donor template comprising at least a portion of a SOD1 gene coding the SOD1 protein or the SOD1 regulatory element for correcting (by knocking in) or knocking down or knocking out the mutant SOD1 gene. In still other embodiments of the method, the cells are contacted with a second gNA or a nucleic acid encoding the second gNA, wherein the second gNA has a targeting sequence complementary to a different or overlapping portion of the SOD1 target nucleic acid compared to the first gNA, resulting in an additional break in the SOD1 target nucleic acid of the cells of the population. In other embodiments, the method further comprises contacting the target nucleic acid with an additional CRISPR protein, or a nucleic acid encoding the additional CRISPR protein wherein the additional CRISPR protein is a CasX protein having a sequence different from the first CasX. In other cases, the additional CRISPR protein is not a CasX protein, and can be a Cas9, Cas12a, Cas12b, Cas12c, Cas12d (CasY), Cas13a, Cas13b, Cas13c, Cas13d, CasX, CasY, Cas14, Cpf1, C2cl, Csn2, Cas Phi, or sequence variants thereof.

[0017] In some cases, the modifying of the target nucleic acid occurs in a cell in vitro or ex vivo. In other cases, the modifying of the target nucleic acid occurs in a cell in vivo. In some embodiments, the cells of the population to be modified is are eukaryotic cells selected from the group consisting of rodent cells, mouse cells, rat cells, primate cells, non-human primate cells, and human cells. In some embodiments, the cells of the population are selected from the group consisting of embryonic stem (ES) cells, induced pluripotent stem cell (iPSC), central nervous system (CNS) cells, and peripheral nervous system (PNS) cells. In other embodiments, the cells of the population comprise neuron cells of the CNS or the PNS. In some embodiments, the neuron cells comprise spinal motor neuron cells or oligodendrocyte cells. In other embodiments, the cells of the population are glial cells or Schwann cells of the PNS. In some embodiments, the modification of the target nucleic acid comprises correction of the mutation to the wild-type sequence.

[0018] In some embodiments of the method of modifying a SOD1 target nucleic acid sequence of a cell, the vector is administered to a subject at a therapeutically effective dose. The subject can be a rodent, a mouse, a rat, a non-human primate, or a human. The dose can be administered by a route of administration selected from the group consisting of intraparenchymal, intravenous, intra-arterial, intracerebroventricular, intracisternal, intrathecal, intracranial, lumbar, and intraperitoneal routes.

[0019] In other embodiments, the disclosure provides populations of cells modified by the foregoing methods. In some embodiments, the cell is a eukaryotic cell selected from the group consisting of a rodent cell, a mouse cell, a rat cell, a primate cell, a non-human primate cell, and a human cell. The cell can be a cell of the central nervous system (CNS) or peripheral nervous system (PNS). In some embodiments, the cells are autologous with respect to the subject to be administered the cell. In other embodiments, the cells are allogeneic with respect to the subject to be administered the cell. In some embodiments, the cell is a neuron, a spinal motor neuron, a glial cell, an oligodendrocyte, or a Schwann cell. In some embodiments, the disclosure provides a method of treating a SOD1-related disorder in a subject in need thereof, comprising administering to the subject an effective amount of the cells of the foregoing.

[0020] In other embodiments, the disclosure provides a method of treating a SOD1—related disorder in a subject in need thereof, comprising modifying a SOD1 gene having one or more mutations in the cells of the subject, the modifying comprising contacted said cells with a therapeutically effective dose of: a) the CasX:gNA system of any of the embodiments described herein; b) a nucleic acid encoding the CasX:gNA system embodiments of (a); c) a vector comprising the nucleic acid of (b); d) a VLP comprising the CasX:gNA system of (a); or e) combinations of two or more of (a)-(d) wherein the SOD1 target nucleic acid sequence of the cells is modified by the CasX protein. In some cases, the vector encodes or comprises the CasX protein and the gNA, and optionally further comprises the donor template. In some embodiments, the vector is selected from the group consisting of an Adeno-Associated Viral (AAV) vector, a retroviral vector, or a virus-like particle. In some embodiments, the subject is selected from the group consisting of mouse, rat, non-human primate, and human. In some embodiments, the vector is administered to the subject by a route of administration selected from the group consisting of intraparenchymal, intravenous, intra-arterial, intracerebroventricular, intracisternal, intrathecal, intracranial, lumbar, and intraperitoneal routes. In other embodiments, the SOD1-related disorder is amyotrophic lateral sclerosis (ALS). In some embodiments, the method results in improvement in at least one clinically-relevant endpoint in the subject selected from the group consisting of ALS Functional Rating Scale (ALSFRS-(R)), combined assessment of function and survival, duration of response, time to death, time to tracheostomy, time to persistent assisted ventilation (DTP), forced vital capacity (% FVC); manual muscle test, maximum voluntary isometric contraction, duration of response, progression-free survival, time to progression of disease, and time-to-treatment failure. In other embodiments, the method results in improvement in at least two clinically-relevant endpoints in the subject.

[0021] In some embodiments, the present disclosure provides kits comprising the nucleic acids, vectors, CasX proteins, gNAs and gene editing pairs described herein.

[0022] In another aspect, provided herein are compositions comprising gene editing pairs, or compositions of vectors comprising or encoding gene editing pairs for use as a medicament for the treatment of a subject having a SOD1 related disorder.

[0023] In another aspect, provided herein are CasX:gNA systems, compositions comprising CasX:gNA systems, vectors comprising or encoding CasX:gNA systems, VLP comprising CasX:gNA systems, or populations of cells edited using the CasX:gNA systems for use as a medicament for the treatment of a SOD1-related disorder.

In another aspect, provided herein are CasX:gNA systems, composition comprising g CasX:gNA systems, or vectors comprising or encoding CasX:gNA systems, VLP comprising CasX:gNA systems, populations of cells edited using the CasX:gNA systems, for use in a method of treatment of a SOD-1 related disorder in a subject in need thereof.

### INCORPORATION BY REFERENCE

[0024] All publications, patents, and patent applications mentioned in this specification are herein incorporated by reference to the same extent as if each individual publication, patent, or patent application was specifically and individually indicated to be incorporated by reference.

[0025] The contents of PCT/US2020/036505, filed on Jun. 5, 2020, which discloses CasX variants and gNA variants, are hereby incorporated by reference in their entirety.

### BRIEF DESCRIPTION OF THE DRAWINGS

[0026] The novel features of the disclosure are set forth with particularity in the appended claims. A better understanding of the features and advantages of the present disclosure will be obtained by reference to the following detailed description that sets forth illustrative embodiments, in which the principles of the disclosure are utilized, and the accompanying drawings of which:

[0027] FIG. 1 shows an SDS-PAGE gel of StX2 purification fractions visualized by colloidal Coomassie staining, as described in Example 1.

[0028] FIG. 2 shows the chromatogram from a size exclusion chromatography assay of the StX2, using of Superdex 200 16/600 pg Gel Filtration, as described in Example 1.

[0029] FIG. 3 shows an SDS-PAGE gel of StX2 purification fractions visualized by colloidal Coomassie staining, as described in Example 1.

[0030] FIG. 4 is a schematic showing the organization of the components in the pSTX34 plasmid used to assemble the CasX constructs, as described in Example 2.

[0031] FIG. 5 is a schematic showing the steps of generating the CasX 119 variant, as described in Example 2.

[0032] FIG. 6 shows an SDS-PAGE gel of purification samples, visualized on a Bio-Rad Stain-Free™ gel, as described in Example 2.

[0033] FIG. 7 shows the chromatogram of Superdex 200 16/600 pg Gel Filtration, as described in Example 2.

[0034] FIG. 8 shows an SDS-PAGE gel of gel filtration samples, stained with colloidal Coomassie, as described in Example 2.

[0035] FIG. 9 shows the results of an editing assay of 6 target genes in HEK293T cells, as described in Example 10. Each dot represents results using an individual spacer.

[0036] FIG. 10 shows the results of an editing assay of 6 target genes in HEK293T cells, with individual bars representing the results obtained with individual spacers, as described in Example 10.

[0037] FIG. 11 shows the results of an editing assay of 4 target genes in HEK293T cells, as described in Example 10. Each dot represents results using an individual spacer utilizing a CTC PAM.

[0038] FIG. 12 is a graph of the results of an assay for the quantification of active fractions of RNP formed by sgRNA174 and the CasX variants, as described in Example 14. Equimolar amounts of RNP and target were co-incubated and the amount of cleaved target was determined at the indicated timepoints. Mean and standard deviation of three independent replicates are shown for each timepoint. The biphasic fit of the combined replicates is shown. “2” refers to the reference CasX protein of SEQ ID NO: 2.

[0039] FIG. 13 shows the quantification of active fractions of RNP formed by CasX2 and the modified sgRNAs, as described in Example 14. Equimolar amounts of RNP and target were co-incubated and the amount of cleaved target was determined at the indicated timepoints. Mean and standard deviation of three independent replicates are shown for each timepoint. The biphasic fit of the combined replicates is shown.

[0040] FIG. 14 shows the quantification of active fractions of RNP formed by CasX 491 and the modified sgRNAs under guide-limiting conditions, as described in Example 14. Equimolar amounts of RNP and target were co-incubated and the amount of cleaved target was determined at the indicated timepoints. The biphasic fit of the data is shown.

[0041] FIG. 15 shows the quantification of cleavage rates of RNP formed by sgRNA174 and the CasX variants, as described in Example 14. Target DNA was incubated with a 20-fold excess of the indicated RNP and the amount of cleaved target was determined at the indicated time points. Mean and standard deviation of three independent replicates are shown for each timepoint, except for 488 and 491 where a single replicate is shown. The monophasic fit of the combined replicates is shown.

[0042] FIG. 16 shows the quantification of cleavage rates of RNP formed by CasX2 and the sgRNA variants, as described in Example 14. Target DNA was incubated with a 20-fold excess of the indicated RNP and the amount of cleaved target was determined at the indicated time points. Mean and standard deviation of three independent replicates are shown for each timepoint. The monophasic fit of the combined replicates is shown.

[0043] FIG. 17 shows the quantification of initial velocities of RNP formed by CasX2 and the sgRNA variants, as described in Example 14. The first two time-points of the previous cleavage experiment were fit with a linear model to determine the initial cleavage velocity.

[0044] FIG. 18 shows the quantification of cleavage rates of RNP formed by CasX491 and the sgRNA variants, as described in Example 14. Target DNA was incubated with a 20-fold excess of the indicated RNP at 10° C. and the amount of cleaved target was determined at the indicated time points. The monophasic fit of the timepoints is shown.

[0045] FIG. 19 is a schematic showing construction of the SOD1-GFP reporter line made by knocking in GFP at the endogenous human SOD1 locus, as described in Example 15.

[0046] FIG. 20 is an example fluorescence activated cell sorting (FACS) plot illustrating an exemplary method for assaying the effectiveness of a reference CasX protein or single guide RNA (sgRNA), or variants thereof, as described in Example 15.

[0047] FIG. 21 shows the results of gene editing in the SOD1-GFP reporter cell line, as described in Example 15.

[0048] FIG. 22 shows the results of gene editing in the SOD1-GFP reporter cell line, as described in Example 15.

[0049] FIG. 23 shows the results of gene editing in the SOD1-GFP reporter cell line, as described in Example 15.

[0050] FIG. 24 is a schematic depicting the location of the SOD1 targeting spacers, referred to in Example 15, in the SOD1 gene.

[0051] FIG. 25 shows the results of gene editing in the SY5Y cell line, as described in Example 15.

[0052] FIG. 26 shows that spacers with improved ability to edit the SOD1 gene can be identified from the screening method described in Example 15.

[0053] FIG. 27 is a schematic showing an example of CasX protein and scaffold DNA sequence for packaging in adeno-associated virus (AAV), as described in Example 16.

[0054] FIG. 28 is a graph showing representative results of AAV titering by qPCR, as described in Example 16.

[0055] FIG. 29 shows the results of AAV-mediated gene editing in the SOD1-GFP reporter cell line, as described in Example 17.

[0056] FIG. 30 shows the results of second AAV-mediated gene editing example in the SOD1-GFP reporter cell line, as described in Example 17.

[0057] FIG. 31 shows an agarose gel image from the T7E1 assay, demonstrating successful editing of the SOD1 locus by CasX delivered via AAV, as described in Example 17.

[0058] FIG. 32 shows results from a flow cytometry assay, as described in Example 18.

[0059] FIG. 33 provides Table 3, referred to herein throughout, listing SOD1 spacer sequences (SEQ ID NOs: 372-2100, 2281-12495).

### DETAILED DESCRIPTION

[0060] While exemplary embodiments have been shown and described herein, it will be obvious to those skilled in the art that such embodiments are provided by way of example only. Numerous variations, changes, and substitutions will now occur to those skilled in the art without departing from the inventions claimed herein. It should be understood that various alternatives to the embodiments described herein may be employed in practicing the embodiments of the disclosure. It is intended that the claims define the scope of the invention and that methods and structures within the scope of these claims and their equivalents be covered thereby.

[0061] Unless otherwise defined, all technical and scientific terms used herein have the same meaning as commonly understood by one of ordinary skill in the art to which this invention belongs. Although methods and materials similar or equivalent to those described herein can be used in the practice or testing of the present embodiments, suitable methods and materials are described below. In case of conflict, the patent specification, including definitions, will control. In addition, the materials, methods, and examples are illustrative only and not intended to be limiting. Numerous variations, changes, and substitutions will now occur to those skilled in the art without departing from the invention.

### Definitions

[0062] The terms “polynucleotide” and “nucleic acid,” used interchangeably herein, refer to a polymeric form of nucleotides of any length, either ribonucleotides or deoxyribonucleotides. Thus, terms “polynucleotide” and “nucleic acid” encompass single-stranded DNA; double-stranded DNA; multi-stranded DNA; single-stranded RNA; double-stranded RNA; multi-stranded RNA; genomic DNA; cDNA; DNA-RNA hybrids; and a polymer comprising purine and pyrimidine bases or other natural, chemically or biochemically modified, non-natural, or derivatized nucleotide bases.

[0063] “Hybridizable” or “complementary” are used interchangeably to mean that a nucleic acid (e.g., RNA, DNA) comprises a sequence of nucleotides that enables it to non-covalently bind, i.e., form Watson-Crick base pairs and/or G/U base pairs, “anneal”, or “hybridize,” to another nucleic acid in a sequence-specific, antiparallel, manner (i.e., a nucleic acid specifically binds to a complementary nucleic acid) under the appropriate in vitro and/or in vivo conditions of temperature and solution ionic strength. It is understood that the sequence of a polynucleotide need not be 100% complementary to that of its target nucleic acid to be specifically hybridizable; it can have at least about 70%, at least about 80%, or at least about 90%, or at least about 95% sequence identity and still hybridize to the target nucleic acid. Moreover, a polynucleotide may hybridize over one or more segments such that intervening or adjacent segments are not involved in the hybridization event (e.g., a loop structure or hairpin structure, a ‘bulge’, ‘bubble’ and the like).

[0064] A “gene,” for the purposes of the present disclosure, includes a DNA region encoding a gene product (e.g., a protein, RNA), as well as all DNA regions which regulate the production of the gene product, whether or not such regulatory sequences are adjacent to coding and/or transcribed sequences. Accordingly, a gene may include regulatory sequences including, but not necessarily limited to, promoter sequences, terminators, translational regulatory sequences such as ribosome binding sites and internal ribosome entry sites, enhancers, silencers, insulators, boundary elements, replication origins, matrix attachment sites and locus control regions. Coding sequences encode a gene product upon transcription or transcription and translation; the coding sequences of the disclosure may comprise fragments and need not contain a full-length open reading frame. A gene can include both the strand that is transcribed, e.g. the strand containing the coding sequence, as well as the complementary strand.

[0065] The term “downstream” refers to a nucleotide sequence that is located 3′ to a reference nucleotide sequence. In certain embodiments, downstream nucleotide sequences relate to sequences that follow the starting point of transcription. For example, the translation initiation codon of a gene is located downstream of the start site of transcription.

[0066] The term “upstream” refers to a nucleotide sequence that is located 5′ to a reference nucleotide sequence. In certain embodiments, upstream nucleotide sequences relate to sequences that are located on the 5′ side of a coding region or starting point of transcription. For example, most promoters are located upstream of the start site of transcription.

[0067] The term “regulatory element” is used interchangeably herein with the term “regulatory sequence,” and is intended to include promoters, enhancers, and other expression regulatory elements (e.g. transcription termination signals, such as polyadenylation signals and poly-U sequences). Exemplary regulatory elements include a transcription promoter such as, but not limited to, CMV, CMV+intron A, SV40, RSV, HIV-Ltr, elongation factor 1 alpha (EF1α), MMLV-ltr, internal ribosome entry site (IRES) or P2A peptide to permit translation of multiple genes from a single transcript, metallothionein, a transcription enhancer element, a transcription termination signal, polyadenylation sequences, sequences for optimization of initiation of translation, and translation termination sequences. It will be understood that the choice of the appropriate regulatory element will depend on the encoded component to be expressed (e.g., protein or RNA) or whether the nucleic acid comprises multiple components that require different polymerases or are not intended to be expressed as a fusion protein.

[0068] The term “promoter” refers to a DNA sequence that contains an RNA polymerase binding site, transcription start site, TATA box, and/or B recognition element and assists or promotes the transcription and expression of an associated transcribable polynucleotide sequence and/or gene (or transgene). A promoter can be synthetically produced or can be derived from a known or naturally occurring promoter sequence or another promoter sequence. A promoter can be proximal or distal to the gene to be transcribed. A promoter can also include a chimeric promoter comprising a combination of two or more heterologous sequences to confer certain properties. A promoter of the present disclosure can include variants of promoter sequences that are similar in composition, but not identical to, other promoter sequence(s) known or provided herein. A promoter can be classified according to criteria relating to the pattern of expression of an associated coding or transcribable sequence or gene operably linked to the promoter, such as constitutive.

[0069] The term “enhancer” refers to regulatory element DNA sequences that, when bound by specific proteins called transcription factors, regulate the expression of an associated gene. Enhancers may be located in the intron of the gene, or 5′ or 3′ of the coding sequence of the gene. Enhancers may be proximal to the gene (i.e., within a few tens or hundreds of base pairs (bp) of the promoter), or may be located distal to the gene (i.e., thousands of bp, hundreds of thousands of bp, or even millions of bp away from the promoter). A single gene may be regulated by more than one enhancer, all of which are envisaged as within the scope of the instant disclosure.

[0070] “Recombinant,” as used herein, means that a particular nucleic acid (DNA or RNA) is the product of various combinations of cloning, restriction, and/or ligation steps resulting in a construct having a structural coding or non-coding sequence distinguishable from endogenous nucleic acids found in natural systems. Generally, DNA sequences encoding the structural coding sequence can be assembled from cDNA fragments and short oligonucleotide linkers, or from a series of synthetic oligonucleotides, to provide a synthetic nucleic acid which is capable of being expressed from a recombinant transcriptional unit contained in a cell or in a cell-free transcription and translation system. Such sequences can be provided in the form of an open reading frame uninterrupted by internal non-translated sequences, or introns, which are typically present in eukaryotic genes. Genomic DNA comprising the relevant sequences can also be used in the formation of a recombinant gene or transcriptional unit. Sequences of non-translated DNA may be present 5′ or 3′ from the open reading frame, where such sequences do not interfere with manipulation or expression of the coding regions, and may indeed act to modulate production of a desired product by various mechanisms (see “enhancers” and “promoters”, above).

[0071] The term “recombinant polynucleotide” or “recombinant nucleic acid” refers to one which is not naturally occurring, e.g., is made by the artificial combination of two otherwise separated segments of sequence through human intervention. This artificial combination is often accomplished by either chemical synthesis means, or by the artificial manipulation of isolated segments of nucleic acids, e.g., by genetic engineering techniques. Such is usually done to replace a codon with a redundant codon encoding the same or a conservative amino acid, while typically introducing or removing a sequence recognition site. Alternatively, it is performed to join together nucleic acid segments of desired functions to generate a desired combination of functions. This artificial combination is often accomplished by either chemical synthesis means, or by the artificial manipulation of isolated segments of nucleic acids, e.g., by genetic engineering techniques.

[0072] Similarly, the term “recombinant polypeptide” or “recombinant protein” refers to a polypeptide or protein which is not naturally occurring, e.g., is made by the artificial combination of two otherwise separated segments of amino sequence through human intervention. Thus, e.g., a protein that comprises a heterologous amino acid sequence is recombinant.

[0073] As used herein, the term “contacting” means establishing a physical connection between two or more entities. For example, contacting a target nucleic acid with a guide nucleic acid means that the target nucleic acid and the guide nucleic acid are made to share a physical connection; e.g., can hybridize if the sequences share sequence similarity.

[0074] “Dissociation constant”, or “K_{d}”, are used interchangeably and mean the affinity between a ligand “L” and a protein “P”; i.e., how tightly a ligand binds to a particular protein. It can be calculated using the formula K_{d}=[L] [P]/[LP], where [P], [L] and [LP] represent molar concentrations of the protein, ligand and complex, respectively.

[0075] The disclosure provides compositions and methods useful for editing a target nucleic acid sequence. As used herein “editing” is used interchangeably with “modifying” and includes but is not limited to cleaving, nicking, deleting, knocking in, knocking out, and the like.

[0076] The term “knock-out” refers to the elimination of a gene or the expression of a gene. For example, a gene can be knocked out by either a deletion or an addition of a nucleotide sequence that leads to a disruption of the reading frame. As another example, a gene may be knocked out by replacing a part of the gene with an irrelevant sequence. The term “knock-down” as used herein refers to reduction in the expression of a gene or its gene product(s). As a result of a gene knock-down, the protein activity or function may be attenuated or the protein levels may be reduced or eliminated.

[0077] As used herein, “homology-directed repair” (HDR) refers to the form of DNA repair that takes place during repair of double-strand breaks in cells. This process requires nucleotide sequence homology, and uses a donor template to repair or knock-out a target DNA, and leads to the transfer of genetic information from the donor (e.g., such as the donor template) to the target. Homology-directed repair can result in an alteration of the sequence of the target nucleic acid sequence by insertion, deletion, or mutation if the donor template differs from the target DNA sequence and part or all of the sequence of the donor template is incorporated into the target DNA.

[0078] As used herein, “non-homologous end joining” (NHEJ) refers to the repair of double-strand breaks in DNA by direct ligation of the break ends to one another without the need for a homologous template (in contrast to homology-directed repair, which requires a homologous sequence to guide repair). NHEJ often results in the loss (deletion) of nucleotide sequence near the site of the double-strand break. As used herein “micro-homology mediated end joining” (MMEJ) refers to a mutagenic DSB repair mechanism, which always associates with deletions flanking the break sites without the need for a homologous template (in contrast to homology-directed repair, which requires a homologous sequence to guide repair). MMEJ often results in the loss (deletion) of nucleotide sequence near the site of the double-strand break.

[0079] A polynucleotide or polypeptide (or protein) has a certain percent “sequence similarity” or “sequence identity” to another polynucleotide or polypeptide, meaning that, when aligned, that percentage of bases or amino acids are the same, and in the same relative position, when comparing the two sequences. Sequence similarity (sometimes referred to as percent similarity, percent identity, or homology) can be determined in a number of different manners. To determine sequence similarity, sequences can be aligned using the methods and computer programs that are known in the art, including BLAST, available over the world wide web at ncbi.nlm.nih.gov/BLAST. Percent complementarity between particular stretches of nucleic acid sequences within nucleic acids can be determined using any convenient method. Example methods include BLAST programs (basic local alignment search tools) and PowerBLAST programs (Altschul et al., J. Mol. Biol., 1990, 215, 403-410; Zhang and Madden, Genome Res., 1997, 7, 649-656) or by using the Gap program (Wisconsin Sequence Analysis Package, Version 8 for Unix, Genetics Computer Group, University Research Park, Madison Wis.), e.g., using default settings, which uses the algorithm of Smith and Waterman (Adv. Appl. Math., 1981, 2, 482-489).

[0080] The terms “polypeptide,” and “protein” are used interchangeably herein, and refer to a polymeric form of amino acids of any length, which can include coded and non-coded amino acids, chemically or biochemically modified or derivatized amino acids, and polypeptides having modified peptide backbones. The term includes fusion proteins, including, but not limited to, fusion proteins with a heterologous amino acid sequence.

[0081] A “vector” or “expression vector” is a replicon, such as plasmid, phage, virus, or cosmid, to which another DNA segment, i.e., an “insert”, may be attached so as to bring about the replication or expression of the attached segment in a cell.

[0082] The term “naturally-occurring” or “unmodified” or “wild type” as used herein as applied to a nucleic acid, a polypeptide, a cell, or an organism, refers to a nucleic acid, polypeptide, cell, or organism that is found in nature.

[0083] As used herein, a “mutation” refers to an insertion, deletion, substitution, duplication, or inversion of one or more amino acids or nucleotides as compared to a wild-type or reference amino acid sequence or to a wild-type or reference nucleotide sequence.

[0084] As used herein the term “isolated” is meant to describe a polynucleotide, a polypeptide, or a cell that is in an environment different from that in which the polynucleotide, the polypeptide, or the cell naturally occurs. An isolated genetically modified host cell may be present in a mixed population of genetically modified host cells.

[0085] A “host cell,” as used herein, denotes a eukaryotic cell, a prokaryotic cell, or a cell from a multicellular organism (e.g., a cell line) cultured as a unicellular entity, which eukaryotic or prokaryotic cells are used as recipients for a nucleic acid (e.g., an expression vector), and include the progeny of the original cell which has been genetically modified by the nucleic acid. It is understood that the progeny of a single cell may not necessarily be completely identical in morphology or in genomic or total DNA complement as the original parent, due to natural, accidental, or deliberate mutation. A “recombinant host cell” (also referred to as a “genetically modified host cell”) is a host cell into which has been introduced a heterologous nucleic acid, e.g., an expression vector.

[0086] The term “conservative amino acid substitution” refers to the interchangeability in proteins of amino acid residues having similar side chains. For example, a group of amino acids having aliphatic side chains consists of glycine, alanine, valine, leucine, and isoleucine; a group of amino acids having aliphatic-hydroxyl side chains consists of serine and threonine; a group of amino acids having amide-containing side chains consists of asparagine and glutamine; a group of amino acids having aromatic side chains consists of phenylalanine, tyrosine, and tryptophan; a group of amino acids having basic side chains consists of lysine, arginine, and histidine; and a group of amino acids having sulfur-containing side chains consists of cysteine and methionine. Exemplary conservative amino acid substitution groups are: valine-leucine-isoleucine, phenylalanine-tyrosine, lysine-arginine, alanine-valine, and asparagine-glutamine.

[0087] As used herein, “treatment” or “treating,” are used interchangeably herein and refer to an approach for obtaining beneficial or desired results, including but not limited to a therapeutic benefit and/or a prophylactic benefit. By therapeutic benefit is meant eradication or amelioration of the underlying disorder or disease being treated. A therapeutic benefit can also be achieved with the eradication or amelioration of one or more of the symptoms or an improvement in one or more clinical parameters associated with the underlying disease such that an improvement is observed in the subject, notwithstanding that the subject may still be afflicted with the underlying disorder.

[0088] The terms “therapeutically effective amount” and “therapeutically effective dose”, as used herein, refer to an amount of a drug or a biologic, alone or as a part of a composition, that is capable of having any detectable, beneficial effect on any symptom, aspect, measured parameter or characteristics of a disease state or condition when administered in one or repeated doses to a subject such as a human or an experimental animal. Such effect need not be absolute to be beneficial.

[0089] As used herein, “administering” is meant a method of giving a dosage of a compound (e.g., a composition of the disclosure) or a composition (e.g., a pharmaceutical composition) to a subject.

[0090] A “subject” is a mammal. Mammals include, but are not limited to, domesticated animals, non-human primates, humans, rabbits, mice, rats and other rodents.

[0091] All publications, patents, and patent applications mentioned in this specification are herein incorporated by reference to the same extent as if each individual publication, patent, or patent application was specifically and individually indicated to be incorporated by reference.

[0092] I. General Methods

[0093] The practice of the present invention employs, unless otherwise indicated, conventional techniques of immunology, biochemistry, chemistry, molecular biology, microbiology, cell biology, genomics and recombinant DNA, which can be found in such standard textbooks as Molecular Cloning: A Laboratory Manual, 3rd Ed. (Sambrook et al., Harbor Laboratory Press 2001); Short Protocols in Molecular Biology, 4th Ed. (Ausubel et al. eds., John Wiley & Sons 1999); Protein Methods (Bollag et al., John Wiley & Sons 1996); Nonviral Vectors for Gene Therapy (Wagner et al. eds., Academic Press 1999); Viral Vectors (Kaplift & Loewy eds., Academic Press 1995); Immunology Methods Manual (I. Lefkovits ed., Academic Press 1997); and Cell and Tissue Culture: Laboratory Procedures in Biotechnology (Doyle & Griffiths, John Wiley & Sons 1998), the disclosures of which are incorporated herein by reference.

[0094] Where a range of values is provided, it is understood that endpoints are included and that each intervening value, to the tenth of the unit of the lower limit unless the context clearly dictates otherwise, between the upper and lower limit of that range and any other stated or intervening value in that stated range, is encompassed. The upper and lower limits of these smaller ranges may independently be included in the smaller ranges, and are also encompassed, subject to any specifically excluded limit in the stated range. Where the stated range includes one or both of the limits, ranges excluding either or both of those included limits are also included.

[0095] Unless defined otherwise, all technical and scientific terms used herein have the same meaning as commonly understood by one of ordinary skill in the art to which this invention belongs. All publications mentioned herein are incorporated herein by reference to disclose and describe the methods and/or materials in connection with which the publications are cited.

[0096] It must be noted that as used herein and in the appended claims, the singular forms “a,” “an,” and “the” include plural referents unless the context clearly dictates otherwise.

[0097] It will be appreciated that certain features of the disclosure, which are, for clarity, described in the context of separate embodiments, may also be provided in combination in a single embodiment. In other cases, various features of the disclosure, which are, for brevity, described in the context of a single embodiment, may also be provided separately or in any suitable sub-combination. It is intended that all combinations of the embodiments pertaining to the disclosure are specifically embraced by the present disclosure and are disclosed herein just as if each and every combination was individually and explicitly disclosed. In addition, all sub-combinations of the various embodiments and elements thereof are also specifically embraced by the present disclosure and are disclosed herein just as if each and every such sub-combination was individually and explicitly disclosed herein.

[0098] II. CasX:gNA Systems for Genetic Editing of SOD1 Genes

[0099] In a first aspect, the present disclosure provides systems comprising a CRISPR nuclease and one or more guide nucleic acids (gNA) that have utility in genome editing of eukaryotic cells. In some embodiments, the CRISPR nuclease is selected from the group consisting of Cas9, Cas12a, Cas12b, Cas12c, Cas12d (CasY), CasX, Cas13a, Cas13b, Cas13c, Cas13d, CasX, CasY, Cas14, Cpf1, C2cl, Csn2, and Cas Phi. In some embodiments, the CRISPR nuclease is a is a Type V CRISPR nuclease. In some embodiments, the present disclosure provides CasX:gNA systems comprising a CasX protein and one or more guide nucleic acids (gNA) for use in modifying a SOD1 gene (collectively referred to herein as the “target nucleic acid”, inclusive of coding and non-coding regions). The SOD1 gene to be modified may comprise one or more mutations in the sequence region selected from the group consisting of a SOD1 intron, a SOD1 exon, a SOD1 intron-exon junction, a SOD1 regulatory element, and an intergenic region.

[0100] In some embodiments, the CasX:gNA systems are specifically designed to modify the SOD1 gene in eukaryotic cells. Generally, any portion of the SOD1 target nucleic acid can be targeted using the programmable compositions and methods provided herein. In some embodiments, the disclosure provides CasX:gNA systems comprising one or more of a CasX protein, one or more guide nucleic acids (gNA) and, optionally, one or more donor template nucleic acids. In other cases, the CasX:gNA system is delivered to a cell to be modified using a vector, which can comprise either nucleic acids encoding the components or deliver the CasX and gNA (and optionally the donor template) in their functional form. Each of these components and their use in the editing of SOD1 target nucleic acid is described herein, below.

[0101] In some cases, a gNA and a CasX protein of the disclosure can form a complex and bind via non-covalent interactions, referred to herein as a ribonucleoprotein (RNP) complex. As provided herein, in some embodiments, the use of a pre-complexed CasX:gNA may confer advantages in the delivery of the system components to a cell or target nucleic acid for editing of the target nucleic acid. For example, in the RNP, the gNA can provide target specificity to the complex by including a guide sequence having a nucleotide sequence that is complementary to a sequence of a target nucleic acid while the CasX protein of the pre-complexed CasX:gNA provides the site-specific activity that is guided to a target site (e.g., stabilized at a target site) within a target nucleic acid sequence (e.g., a SOD1 gene to be modified) by virtue of its association with the guide NA. The CasX protein of the complex provides the site-specific activities of the complex such as cleavage or nicking of the target nucleic acid sequence by the CasX protein and/or an activity provided by the fusion partner in the case of a chimeric CasX protein. The CasX proteins and gNA components of the CasX:gNA systems and their features are described more fully, below.

[0102] In some embodiments, the CasX:gNA systems utilized in the editing of the SOD1 gene can further comprise a donor template comprising all or at least a portion of a gene encoding a SOD1 protein or encoding a SOD1 regulatory element wherein the donor template comprises one or more mutations for either knocking out or knocking down (described more fully, below) the SOD1 gene. In other cases, the CasX:gNA systems can further comprise a donor template for the introduction (or knocking in) of all or a portion of an open reading frame encoding a protein for the production of a wild-type SOD1 protein in the target cell or a sequence for correcting the one or more mutations of the SOD1 gene. In a particular embodiment of the foregoing, gNAs targeting the upstream sequence Exon 1 and Intron 1 can be used to introduce breaks that permit the insertion of full length cDNA encoding the SOD1 protein, replacing the mutated endogenous SOD1 gene and restoring protein expression. In other embodiments, the CasX:gNA systems can further comprise a donor template for the introduction of a regulatory element to correct the one or more mutations of the SOD1 regulatory element. In some embodiments, the donor polynucleotide comprises at least about 10, at least about 50, at least about 100, or at least about 200, or at least about 300, or at least about 400, or at least about 500, or at least about 600, or at least about 700, or at least about 800, or at least about 900, or at least about 1000, or at least about 10,000, or at least about 15,000 nucleotides of a SOD1 gene, wherein the SOD1 gene portion is selected from the group consisting of a SOD1 exon, a SOD1 intron, a SOD1 intron-exon junction, a SOD1 regulatory element and an intergenic region; either a wild-type sequence or comprising one or more mutations depending on whether the modification is to knock-down/knock-out or knock-in gene function. In other embodiments, the donor polynucleotide comprises at least about 10 to about 10,000 nucleotides, or at least about 100 to about 8000 nucleotides, or at least about 400 to about 6000 nucleotides, or at least about 600 to about 4000 nucleotides, or at least about 1000 to about 2000 nucleotides of a SOD1 gene. In some embodiments, the donor template is a single stranded DNA template or a single stranded RNA template. In other embodiments, the donor template is a double stranded DNA template.

[0103] The SOD1 gene encodes superoxide dismutase-1 (EC 1.15.1.1), a cytoplasmic antioxidant enzyme that metabolizes superoxide radicals to molecular oxygen and hydrogen peroxide, thus providing a defense against oxygen toxicity (Niwa et al., JBC 282:28087 (2007)). The SOD1 gene and its regulatory element is defined as the sequence that spans chr21:31659622-31668931 of the human genome (GRCh38/hg38) (the notation refers to the chromosome 21 (chr21), starting at the 31,659,622 bp of that chromosome, and extending to the 31,668,931 bp of that chromosome). The coding region consists of five exons interrupted by four introns.

[0104] In some cases, the SOD1 regulatory element is 5′ of the SOD1 gene. In other cases, the SOD1 regulatory element is 3′ of the SOD1 gene. In some embodiments, a SOD1 regulatory element comprises a 5′ untranslated region (UTR) of the SOD1 gene, while in other embodiments, a SOD1 regulatory element comprises a 3′UTR of the SOD1 gene. The SOD1 regulatory element comprises a promoter, and in some cases further comprises an enhancer.

[0105] Soluble cytoplasmic SOD1 is a copper- and zinc-containing enzyme that is highly conserved throughout evolution and makes up 1-2% of the total soluble protein content in the central nervous system (Pardo C A, et al., Cleveland D W. Superoxide dismutase is an abundant component in cell bodies, dendrites, and axons of motor neurons and in a subset of other neurons (Proc Natl Acad Sci USA. 92:954 (1995); Sherman et al., Nucleotide sequence and expression of human chromosome 21-encoded superoxide dismutase mRNA. Proc. Natl. Acad. Sci. U.S.A. 80:5465 (1983)).

[0106] The human SOD1 gene (HGNC:11179; see also GenBank Accession No. CAG46542.1) encodes a protein having the sequence

(SEQ ID NO: 100)
MATKAVCVLKGDGPVQGIINFEQKESNGPVKVWGSIKGLTEGLHGFHVHE
FGDNTAGCTSAGPHFNPLSRKHGGPKDEERHVGDLGNVTADKDGVADVSI
EDSVISLSGDHCIIGRTLVVHEKADDLGKGGNEESTKTGNAGSRLACGVI
GIAQ.

Although human SOD1 contains 154 amino acids, the start methionine is cleaved post-translationally, followed by N-acetylation of the first alanine, therefore making the number of actual amino acids in SOD1 153 (Stevens, J C, et al. Modification of Superoxide Dismutase 1 (SOD1) Properties by a GFP Tag—Implications for Research into Amyotrophic Lateral Sclerosis (ALS). PLoS ONE 5(3): e9541 (2010)). At least 170 mutations across the SOD1 gene have been found to cause amyotrophic lateral sclerosis (ALS) (Pochet, R. Genetics and ALS: Cause for Optimism. Cerebrum cer-05-17 (2017)). Table 1 provides representative examples of SOD1 mutations known to contribute to, or that are associated with ALS in a subject.

TABLE 1
ALS-associated mutations in SOD1

| SOD1 | | |
|---|---|---|
| Amino Acid | WT | Mutant |
| Position* | Amino Acid** | Amino Acid*** |
| 4 | A | S |
| 4 | A | T |
| 4 | A | V |
| 6 | C | F |
| 7 | V | E |
| 8 | L | Q |
| 8 | L | V |
| 12 | G | R |
| 14 | V | G |
| 14 | V | M |
| 16 | G | S |
| 20 | F | C |
| 21 | E | G |
| 21 | E | K |
| 22 | Q | L |
| 37 | G | R |
| 38 | L | R |
| 38 | L | V |
| 41 | G | D |
| 41 | G | S |
| 43 | H | R |
| 45 | F | C |
| 46 | H | R |
| 48 | H | Q |
| 48 | H | R |
| 49 | E | K |
| 54 | T | R |
| 65 | N | S |
| 67 | L | P |
| 67 | L | R |
| 72 | G | S |
| 76 | D | Y |
| 80 | H | A |
| 84 | L | F |
| 84 | L | V |
| 85 | G | R |
| 86 | N | S |
| 87 | V | A |
| 89 | A | T |
| 89 | A | V |
| 90 | D | A |
| 90 | D | V |
| 93 | G | A |
| 93 | G | C |
| 93 | G | D |
| 93 | G | R |
| 93 | G | V |
| 95 | A | G |
| 97 | V | M |
| 100 | E | G |
| 100 | E | K |
| 101 | D | G |
| 101 | D | N |
| 104 | I | F |
| 105 | S | L |
| 106 | L | V |
| 108 | G | V |
| 111 | C | Y |
| 112 | I | M |
| 112 | I | T |
| 113 | I | T |
| 114 | G | A |
| 115 | R | G |
| 118 | V | L |
| 124 | D | G |
| 124 | D | V |
| 125 | D | H |
| 126 | L | S |
| 134 | S | N |
| 139 | N | K |
| 144 | L | F |
| 144 | L | S |
| 145 | A | T |
| 146 | C | R |
| 147 | G | R |
| 148 | V | G |
| 148 | V | I |
| 149 | I | T |
| 151 | I | T |

*Amino acid position relative to SEQ ID NO: 100 without the N-terminal methionine
**Single letter code for wild-type amino acid
***Single letter code for mutant amino acid

[0107] In some cases, the mutation of the SOD1 gene in subjects with a SOD1-related disease is an insertion, deletion, substitution, duplication, or inversion of one or more nucleotides as compared to the wild-type sequence. In one case, the mutation is a gain of function mutation. In other embodiments, the mutation is a loss of function mutation. In some embodiments, the mutation is a mutation of the SOD1 protein of SEQ ID NO:100 selected from the group of amino acid substitutions consisting of A4S, A4T, A4V, C6F, V7E, L8Q, L8V, G12R, V14G, V14M, G16S, F20C, E21G, E21K, Q22L, G37R, L38R, L38V, G41D, G41S, H43R, F45C, H46R, H48Q, H48R, E49K, T54R, N65S, L67P, L67R, G72S, D76Y, H80A, L84F, L84V, G85R, N86S, V87A, A89T, A89V, D90A, D90V, G93A, G93C, G93D, G93R, G93V, A95G, V97M, E100G, E100K, D101G, D101N, 1104F, S105L, L106V, G108V, C111Y, I112M, 1112T, I113T, G114A, R115G, V118L, D124G, D124V, D125H, L126S, S134N, N139K, L144F, L144S, A145T, C146R, G147R, V148G, V1481, 1149T, I151T, and one or more amino acid substitutions of SEQ ID NO:100 that disrupt the function or expression of the SOD1 protein, or is selected from a combination thereof. In a particular embodiment, the SOD1 protein comprises a mutation selected from an A4V mutation of SEQ ID NO:100, a D90A mutation of SEQ ID NO:100, and/or a G93A mutation of SEQ ID NO:100. The present disclosure provides compositions and methods for the editing of nucleic acids comprising these mutations.

[0108] III. Guide Nucleic Acids of the Systems for Genetic Editing

[0109] In another aspect, the disclosure relates to a guide nucleic acid (gNA) comprising a targeting sequence complementary to a target nucleic acid sequence in the target strand of a gene encoding a SOD1 protein, wherein the gNA is capable of forming a complex with a CRISPR protein that is specific to a protospacer adjacent motif (PAM) sequence comprising a TC motif in the complementary non-target strand, and wherein the PAM sequence is located 1 nucleotide 5′ of the sequence in the non-target strand that is complementary to the target nucleic acid sequence in the target strand.

[0110] In another aspect, the disclosure relates to guide nucleic acids (gNA) utilized in the CasX:gNA systems that have utility in genome editing a SOD1 gene in a cell. In some embodiments, the present disclosure provides guide nucleic acids capable of forming a RNP complex with a CasX protein in which the gNA binds to the CasX protein, and wherein the targeting sequence (or spacer, described more fully, below) of the gNA is complementary to, and therefore is capable of hybridizing with the SOD1 gene sequence. In some embodiments, the gNA is a deoxyribonucleic acid molecule (“gDNA”). In some embodiments, the gNA is a ribonucleic acid molecule (“gRNA”). In some embodiments, the gNA is a chimera, and comprises both DNA and RNA (a “chimera”).

[0111] The present disclosure provides specifically-designed guide nucleic acids (“gNAs”) with targeting sequences that are complementary to, and are therefore able to hybridize with either strand of the SOD1 gene as a component of the gene editing CasX:gNA systems. As described more fully, below, representative, but non-limiting examples of targeting sequences to the SOD1 target nucleic acid are presented in Table 3 (Table 3 is provided in FIG. 33). It is envisioned that in some embodiments, multiple gNAs (e.g., multiple gRNAs) are delivered in the CasX:gNA system for the modification of a gene encoding one or more regions of a SOD1 protein, a non-coding region of the SOD1 gene, or a SOD1 regulatory element. For example, when a deletion or a knock-down/knock-out of a SOD1 intron is desired, a pair of gNAs with targeting sequences to different or overlapping regions of the target nucleic acid sequence can be used in order to bind and the CasX to cleave at two different or overlapping sites within or proximal to the intron of the gene, which is then edited by non-homologous end joining (NHEJ), homology-directed repair (HDR, which can include, for example, insertion of a donor template to replace all or a portion of the SOD1 intron), homology-independent targeted integration (HITI), micro-homology mediated end joining (MMEJ), single strand annealing (SSA) or base excision repair (BER). a. Reference gNA and gNA variants

[0112] In some embodiments, a gNA of the present disclosure comprises a sequence of a naturally-occurring gNA (a “reference gNA”). In other cases, a reference gNA of the disclosure may be subjected to one or more mutagenesis methods, such as the mutagenesis methods described herein, which may include Deep Mutational Evolution (DME), deep mutational scanning (DMS), error prone PCR, cassette mutagenesis, random mutagenesis, staggered extension PCR, gene shuffling, or domain swapping, in order to generate one or more gNA variants with enhanced or varied properties relative to the reference gNA. gNA variants also include variants comprising one or more exogenous sequences, for example fused to either the 5′ or 3′ end of the gNA, or inserted internally. The activity of reference gNAs may be used as a benchmark against which the activity of gNA variants are compared, thereby measuring improvements in function or other characteristics of the gNA variants. In other embodiments, a reference gNA may be subjected to one or more deliberate, targeted mutations in order to produce a gNA variant, for example a rationally designed variant. As used herein, the terms gNA, gRNA, and gDNA cover naturally-occurring molecules, as well as sequence variants. Thus, in some embodiments, the gNA is a deoxyribonucleic acid molecule (“gDNA”); in some embodiments, the gNA is a ribonucleic acid molecule (“gRNA”), and in other embodiments, the gNA is a chimera, and comprises both DNA and RNA.

[0113] The gNAs of the disclosure comprise two segments: a targeting sequence and a protein-binding segment. The targeting segment of a gNA includes a nucleotide sequence (referred to interchangeably as a guide sequence, a spacer, a targeting sequence, or a targeting region) that is complementary to (and therefore hybridizes with) a specific sequence (a target site) within the target nucleic acid sequence (e.g., a target ssRNA, a target ssDNA, a strand of a double stranded target DNA, etc.), described more fully below. The targeting sequence of a gNA is capable of binding to a target nucleic acid sequence, including a coding sequence, a complement of a coding sequence, a non-coding sequence, and to regulatory elements. The protein-binding segment (or “protein-binding sequence”) interacts with (e.g., binds to) a CasX protein. The protein-binding segment is alternatively referred to herein as a “scaffold”, which is comprised of several regions, described more fully, below. In some embodiments, the targeting sequence and scaffold each include complementary stretches of nucleotides that hybridize to one another to form a double stranded duplex (dsRNA duplex for a gRNA). Site-specific binding and/or cleavage of a target nucleic acid sequence (e.g., genomic DNA) by the CasX:gNA can occur at one or more locations (e.g., a sequence of a target nucleic acid) determined by base-pairing complementarity between the targeting sequence of the gNA and the target nucleic acid sequence.

[0114] The targeting sequence of a gNA is capable of binding to a SOD1 target nucleic acid sequence, including a coding sequence, a complement of a coding sequence, a non-coding sequence, and to regulatory elements. The gNA scaffold (or “protein-binding sequence”) interacts with (e.g., binds to) a CasX protein, forming an RNP (described more fully, below). In some embodiments, the targeting sequence and scaffold each include complementary stretches of nucleotides that hybridize to one another to form a double stranded duplex (dsRNA duplex for a dgRNA). Site-specific binding and/or cleavage of a target nucleic acid sequence (e.g., genomic DNA) by the CasX protein can occur at one or more locations (e.g., a sequence of a target nucleic acid) determined by base-pairing complementarity between the targeting sequence of the gNA and the target nucleic acid sequence. Thus, for example, the gNA of the disclosure have sequences complementarity to and therefore can hybridize to a sequence in a eukaryotic cell, e.g., a eukaryotic nucleic acid (e.g., a eukaryotic chromosome, chromosomal sequence, a eukaryotic RNA, etc.) that is adjacent to a sequence complementary to a TC PAM motif or a PAM sequence, such as ATC, CTC, GTC, or TTC.

[0115] In the context of nucleic acids, cleavage refers to the breakage of the covalent backbone of a nucleic acid molecule; either DNA or RNA. Cleavage can be initiated by a variety of methods including, but not limited to, enzymatic or chemical hydrolysis of a phosphodiester bond. Both single-stranded cleavage and double-stranded cleavage are possible, and double-stranded cleavage can occur as a result of two distinct single-stranded cleavage events. DNA cleavage can result in the production of either blunt ends or staggered ends.

[0116] In some embodiments, the disclosure provides gene editing pairs of a CasX and a gNA of any of the embodiments described herein that are capable of being bound together prior to their use for gene editing and, thus, are “pre-complexed” as a ribonuclear protein complex (RNP). The use of a pre-complexed RNP confers advantages in the delivery of the system components to a cell or target nucleic acid sequence for editing of the target nucleic acid sequence. The CasX protein of the RNP provides the site-specific activity that is guided to a target site (e.g., stabilized at a target site) within a target nucleic acid sequence by virtue of its association with the guide RNA comprising a targeting sequence capable of hybridizing to the target nucleic acid sequence.

[0117] In some embodiments, wherein the gNA is a gRNA, the term “targeter” or “targeter RNA” is used herein to refer to a crRNA-like molecule (crRNA: “CRISPR RNA”) of a CasX dual guide RNA (and therefore of a CasX single guide RNA when the “activator” and the “targeter” are linked together, e.g., by intervening nucleotides). Thus, for example, a CasX guide RNA (dgRNA or sgRNA) comprises a guide sequence and a duplex-forming segment of a crRNA, which can also be referred to as a crRNA repeat. Because the sequence of a guide sequence hybridizes with a sequence of a SOD1 target nucleic acid sequence, a targeter can be modified by a user to hybridize with a specific target nucleic acid sequence. Thus, in some cases, the sequence of a targeter may be a non-naturally occurring sequence. In other cases, the sequence of a targeter may be a naturally-occurring sequence, derived from the gene to be edited. In the case of a dual guide RNA, the targeter and the activator each have a duplex-forming segment, where the duplex forming segment of the targeter and the duplex-forming segment of the activator have complementarity with one another and hybridize to one another to form a double stranded duplex (dsRNA duplex for a gRNA). In some embodiments, a targeter comprises both the guide sequence of the guide RNA and a stretch of nucleotides that forms one half of the dsRNA duplex of the protein-binding segment of the gRNA. A corresponding tracrRNA-like molecule (activator) also comprises a duplex-forming stretch of nucleotides that forms the other half of the dsRNA duplex of the protein-binding segment of the CasX guide RNA. Thus, a targeter and an activator, as a corresponding pair, hybridize to form a CasX dual guide NA, referred to herein as a “dual guide NA”, a “dual-molecule gNA”, a “dgNA”, a “double-molecule guide NA”, or a “two-molecule guide NA”.

[0118] In some embodiments, the activator and targeter of the reference gNA are covalently linked to one another and comprise a single molecule, referred to herein as a “single-molecule gNA,” “one-molecule guide NA,” “single guide NA”, “single guide RNA”, a “single-molecule guide RNA,” a “one-molecule guide RNA”, a “single guide DNA”, a “single-molecule DNA”, or a “one-molecule guide DNA”, (“sgNA”, “sgRNA”, or a “sgDNA”). In some embodiments, the sgNA includes an “activator” or a “targeter” and thus can be an “activator-RNA” and a “targeter-RNA,” respectively.

[0119] Collectively, the gNAs of the disclosure comprise four distinct regions, or domains: the RNA triplex, the scaffold stem, the extended stem, and the targeting sequence that, in the embodiments of the disclosure are specific for a target nucleic acid. The RNA triplex, the scaffold stem, and the extended stem, together, are referred to as the “scaffold” of the gNA. In some embodiments, the targeting sequence is on the 3′ end of the gNA.

[0120] b. RNA triplex

[0121] In some embodiments of the guide NAs provided herein (including reference sgRNAs), there is a RNA triplex, and the RNA triplex comprises the sequence of a UUU—nX(˜4-15)-UUU (SEQ ID NO: 17) stem loop that ends with an AAAG after 2 intervening stem loops (the scaffold stem loop and the extended stem loop), forming a pseudoknot that may also extend past the triplex into a duplex pseudoknot. The UU-UUU-AAA sequence of the triplex forms as a nexus between the targeting sequence, scaffold stem, and extended stem. In exemplary CasX sgRNAs, the UUU-loop-UUU region is coded for first, then the scaffold stem loop, and then the extended stem loop, which is linked by the tetraloop, and then an AAAG closes off the triplex before becoming the targeting sequence.

[0122] c. Scaffold Stem Loop

[0123] In some embodiments of sgNAs of the disclosure, the triplex region is followed by the scaffold stem loop. The scaffold stem loop is a region of the gNA that is bound by CasX protein (such as a reference or CasX variant protein). In some embodiments, the scaffold stem loop is a fairly short and stable stem loop. In some cases, the scaffold stem loop does not tolerate many changes, and requires some form of an RNA bubble. In some embodiments, the scaffold stem is necessary for CasX sgNA function. While it is perhaps analogous to the nexus stem of Cas9 as being a critical stem loop, the scaffold stem of a CasX sgNA, in some embodiments, has a necessary bulge (RNA bubble) that is different from many other stem loops found in CRISPR/Cas systems. In some embodiments, the presence of this bulge is conserved across sgNA that interact with different CasX proteins. An exemplary sequence of a scaffold stem loop sequence of a gNA comprises the sequence CCAGCGACUAUGUCGUAUGG (SEQ ID NO: 14). In other embodiments, the disclosure provides gNA variants wherein the scaffold stem loop is replaced with an RNA stem loop sequence from a heterologous RNA source with proximal 5′ and 3′ ends, such as, but not limited to stem loop sequences selected from MS2, Q β, U1 hairpin II, Uvsx, or PP7 stem loops. In some cases, the heterologous RNA stem loop of the gNA is capable of binding a protein, an RNA structure, a DNA sequence, or a small molecule

[0124] d. Extended Stem Loop

[0125] In some embodiments of the CasX sgNAs of the disclosure, the scaffold stem loop is followed by the extended stem loop. In some embodiments, the extended stem comprises a synthetic tracr and crRNA fusion that is largely unbound by the CasX protein. In some embodiments, the extended stem loop can be highly malleable. In some embodiments, a single guide gRNA is made with a GAAA tetraloop linker or a GAGAAA linker between the tracr and crRNA in the extended stem loop. In some cases, the targeter and activator of a CasX sgNA are linked to one another by intervening nucleotides and the linker can have a length of from 3 to 20 nucleotides. In some embodiments of the CasX sgNAs of the disclosure, the extended stem is a large 32-bp loop that sits outside of the CasX protein in the ribonucleoprotein complex. An exemplary sequence of an extended stem loop sequence of a sgNA comprises the sequence GCGCUUAUUUAUCGGAGAGAAAUCCGAUAAAUAAGAAGC (SEQ ID NO: 15). In some embodiments, the extended stem loop comprises a GAGAAA spacer sequence. In some embodiments, the disclosure provides gNA variants wherein the extended stem loop is replaced with an RNA stem loop sequence from a heterologous RNA source with proximal 5′ and 3′ ends, such as, but not limited to stem loop sequences selected from MS2, Q3, U1 hairpin II, Uvsx, or PP7 stem loops. In such cases, the heterologous RNA stem loop increases the stability of the gNA. In other embodiments, the disclosure provides gNA variants having an extended stem loop region comprising at least 10, at least 100, at least 500, at least 1000, or at least 10,000 nucleotides.

[0126] e. Targeting Sequence

[0127] In some embodiments of the gNAs of the disclosure, the extended stem loop is followed by a region that forms part of the triplex, and then the targeting sequence (or “spacer”). The targeting sequence targets the CasX ribonucleoprotein holo complex to a specific region of the target nucleic acid sequence of the SOD1 gene. Thus, for example, gNA targeting sequences of the disclosure have sequences complementarity to, and therefore can hybridize to, a portion of the SOD1 gene in a nucleic acid in a eukaryotic cell (e.g., a eukaryotic chromosome, chromosomal sequence, a eukaryotic RNA, etc.) as a component of the RNP when any one of the PAM sequences TTC, ATC, GTC, or CTC is located 1 nucleotide 5′ to the non-target strand sequence complementary to the target sequence. The targeting sequence of a gNA can be modified so that the gNA can target a desired sequence of any desired target nucleic acid sequence, so long as the PAM sequence location is taken into consideration. In some embodiments, the gNA scaffold is 5′ of the targeting sequence, with the targeting sequence on the 3′ end of the gNA. In some embodiments, the PAM sequence recognized by the RNP is TC. In other embodiments, the PAM sequence recognized by the RNP is NTC.

[0128] In some embodiments, the targeting sequence of the gNA is specific for a portion of a gene encoding a SOD1 protein. In some embodiments, the targeting sequence of a gNA is specific for a SOD1 exon. In one embodiment, the targeting sequence of a gNA is specific for SOD1 exon 1. In another embodiment, the targeting sequence of a gNA is specific for SOD1 exon 2. In another embodiment, the targeting sequence of a gNA is specific for SOD1 exon 3. In another embodiment, the targeting sequence of a gNA is specific for SOD1 exon 4. In another embodiment, the targeting sequence of a gNA is specific for SOD1 exon 5. In some embodiments, the targeting sequence of a gNA is specific for a SOD1 intron. In some embodiments, the targeting sequence of the gNA is specific for a SOD1 intron-exon junction. In some embodiments, the targeting sequence of the gNA has a sequence that hybridizes with a SOD1 regulatory element, a SOD1 coding region, a SOD1 non-coding region, or combinations thereof (e.g., the intersection of two regions). In some embodiments, the targeting sequence of the gNA is complementary to a sequence comprising one or more single nucleotide polymorphisms (SNPs) of the SOD1 gene or its complement. SNPs that are within a SOD1 coding sequence or within a SOD1 non-coding sequence are both within the scope of the instant disclosure. In other embodiments, the targeting sequence of the gNA is complementary to a sequence of an intergenic region of the SOD1 gene.

[0129] In some embodiments, the targeting sequence of a gNA is designed to be specific for a regulatory element that regulates expression of the SOD1 gene product. Such regulatory elements include, but are not limited to promoter regions, enhancer regions, intergenic regions, 5′ untranslated regions (5′ UTR), 3′ untranslated regions (3′ UTR), conserved elements, and regions comprising cis-regulatory elements. The promoter region is intended to encompass nucleotides within 5 kb of the initiation point of the encoding sequence or, in the case of gene enhancer elements or conserved elements, can be thousands of bp, hundreds of thousands of bp, or even millions of bp away from the encoding sequence of the gene of the target nucleic acid. In the foregoing, the targets are those in which the encoding gene of the target is intended to be knocked out or knocked down such that the SOD1 protein comprising mutations is not expressed or is expressed at a lower level in a cell.

[0130] In some embodiments, the targeting sequence of the gNA has between 14 and 35 consecutive nucleotides. In some embodiments, the targeting sequence has 14, 15, 16, 18, 18, 19, 20, 21, 22, 23, 24, 25, 26, 27, 28, 29, 30, 31, 32, 33, 34 or 35 consecutive nucleotides. In some embodiments, the targeting sequence consists of 20 consecutive nucleotides. In some embodiments, the targeting sequence consists of 19 consecutive nucleotides. In some embodiments, the targeting sequence consists of 18 consecutive nucleotides. In some embodiments, the targeting sequence consists of 17 consecutive nucleotides. In some embodiments, the targeting sequence consists of 16 consecutive nucleotides. In some embodiments, the targeting sequence consists of 15 consecutive nucleotides. In some embodiments, the targeting sequence has 14, 15, 16, 17, 18, 19, 20, 21, 22, 23, 24, 25, 26, 27, 28, 29, 30, 31, 32, 33, 34 or 35 consecutive nucleotides and the targeting sequence can comprise 0 to 5, 0 to 4, 0 to 3, or 0 to 2 mismatches relative to the target nucleic acid sequence and retain sufficient binding specificity such that the RNP comprising the gNA comprising the targeting sequence can form a complementary bond with respect to the target nucleic acid.

[0131] Representative, but non-limiting examples of targeting sequences for inclusion in the gNA of the disclosure are presented in Table 3 (provided as FIG. 33). In Table 3, the first column indicates the PAM sequence, and the second column indicates the SEQ ID of the accompanying spacer sequence (sometimes referred to herein as the targeting sequence). In some embodiments, the disclosure provides targeting sequences for inclusion in the gNA of the disclosure comprising a sequence that is at least 50% identical, at least 55% identical, at least 60% identical, at least 65% identical, at least 70% identical, at least 75% identical, at least 80% identical, at least 85% identical, at least 90% identical, at least 95% identical, or 100% identical to a sequence in Table 3 (FIG. 33). In some embodiments, the targeting sequence of the gNA comprises a sequence a sequence of Table 3 with a single nucleotide removed from the 3′ end of the sequence. In other embodiments, the targeting sequence of the gNA comprises a sequence a sequence of Table 3 with two nucleotides removed from the 3′ end of the sequence. In other embodiments, the targeting sequence of the gNA comprises a sequence a sequence of Table 3 with three nucleotides removed from the 3′ end of the sequence. In other embodiments, the targeting sequence of the gNA comprises a sequence a sequence of Table 3 with four nucleotides removed from the 3′ end of the sequence. In other embodiments, the targeting sequence of the gNA comprises a sequence a sequence of Table 3 with five nucleotides removed from the 3′ end of the sequence. In the foregoing embodiments of the paragraph, thymine (T) nucleotides can be substituted for one or more or all of the uracil (U) nucleotides in any of the targeting sequences such that the gNA can be a gDNA or a gRNA, or a chimera of RNA and DNA. In some embodiments, a targeting sequence of Table 3 has at least 1, 2, 3, 4, 5, or 6 or more thymine nucleotides substituted for uracil nucleotides. In other embodiments, a gNA, gRNA, or gDNA of the disclosure comprises 1, 2, 3 or more targeting sequences of Table 3, or targeting sequences that are at least 50% identical, at least 55% identical, at least 60% identical, at least 65% identical, at least 70% identical, at least 75% identical, at least 80% identical, at least 85% identical, at least 90% identical, at least 95% identical, or 100% identical to one or more sequences of Table 3.

[0132] In some embodiments, the targeting sequence of the gNA encodes or is complementary to a nucleic acid sequence encoding a mutation of the SOD1 protein of SEQ ID NO:100 selected from the group of amino acid substitutions consisting of A4S, A4T, A4V, C6F, V7E, L8Q, L8V, G12R, V14G, V14M, G16S, F20C, E21G, E21K, Q22L, G37R, L38R, L38V, G41D, G41S, H43R, F45C, H46R, H48Q, H48R, E49K, T54R, N65S, L67P, L67R, G72S, D76Y, H80A, L84F, L84V, G85R, N86S, V87A, A89T, A89V, D90A, D90V, G93A, G93C, G93D, G93R, G93V, A95G, V97M, E100G, E100K, D101G, D101N, I104F, S105L, L106V, G108V, C111Y, I112M, I112T, I113T, G114A, R115G, V118L, D124G, D124V, D125H, L126S, S134N, N139K, L144F, L144S, A145T, C146R, G147R, V148G, V1481, 1149T, I151T, and one or more amino acid substitutions of SEQ ID NO:100 that disrupt the function or expression of the SOD1 protein, or is selected from a combination thereof. In a particular embodiment, the targeting sequence of the gNA is complementary to a nucleic acid sequence encoding a mutation of the SOD1 protein of SEQ ID NO:100 selected from an A4V mutation of SEQ ID NO:100, a D90A mutation of SEQ ID NO:100, a G93A mutation of SEQ ID NO:100, or a combination thereof.

[0133] In some embodiments, the CasX:gNA system comprises a first gNA and further comprises a second (and optionally a third, fourth, fifth, or more) gNA, wherein the second gNA or additional gNA has a targeting sequence complementary to a different or overlapping portion of the target nucleic acid sequence compared to the targeting sequence of the first gNA such that multiple points in the target nucleic acid are targeted, and, for example, multiple breaks are introduced in the target nucleic acid by the CasX. It will be understood that in such cases, the second or additional gNA is complexed with an additional copy of the CasX protein. By selection of the targeting sequences of the gNA, defined regions of the target nucleic acid sequence bracketing a particular location within the target nucleic acid can be modified or edited using the CasX:gNA systems described herein, including facilitating the insertion of a donor template.

[0134] f. gNA scaffolds

[0135] With the exception of the targeting sequence domain, the remaining components of the gNA are referred to herein as the scaffold. In some embodiments, the gNA scaffolds are derived from naturally-occurring sequences, described below as reference gNA. In other embodiments, the gNA scaffolds are variants of reference gNA wherein mutations, insertions, deletions or domain substitutions are introduced to confer desirable properties on the gNA.

[0136] In some embodiments, a CasX reference gRNA comprises a sequence isolated or derived from Deltaproteobacter. In some embodiments, the sequence is a CasX tracrRNA sequence. Exemplary CasX reference tracrRNA sequences isolated or derived from Deltaproteobacter may include: ACAUCUGGCGCGUUUAUUCCAUUACUUUGGAGCCAGUCCCAGCGACUAUGUCGUAU GGACGAAGCGCUUAUUUAUCGGAGA (SEQ ID NO: 6) and ACAUCUGGCGCGUUUAUUCCAUUACUUUGGAGCCAGUCCCAGCGACUAUGUCGUAU GGACGAAGCGCUUAUUUAUCGG (SEQ ID NO: 7). Exemplary crRNA sequences isolated or derived from Deltaproteobacter may comprise a sequence of CCGAUAAGUAAAACGCAUCAAAG (SEQ ID NO: 18). In some embodiments, a CasX reference gNA comprises a sequence at least 60% identical, at least 65% identical, at least 70% identical, at least 75% identical, at least 80% identical, at least 81% identical, at least 82% identical, at least 83% identical, at least 84% identical, at least 85% identical, at least 86% identical, at least 86% identical, at least 87% identical, at least 88% identical, at least 89% identical, at least 89% identical, at least 90% identical, at least 91% identical, at least 92% identical, at least 93% identical, at least 94% identical, at least 95% identical, at least 96% identical, at least 97% identical, at least 98% identical, at least 99% identical, at least 99.5% identical or 100% identical to a sequence isolated or derived from Deltaproteobacter.

[0137] In some embodiments, a CasX reference guide RNA comprises a sequence isolated or derived from Planctomycetes. In some embodiments, the sequence is a CasX tracrRNA sequence. Exemplary CasX reference tracrRNA sequences isolated or derived from Planctomycetes may include: UACUGGCGCUUUUAUCUCAUUACUUUGAGAGCCAUCACCAGCGACUAUGUCGUAUG GGUAAAGCGCUUAUUUAUCGGAGA (SEQ ID NO: 8) and

[0138] UACUGGCGCUUUUAUCUCAUUACUUUGAGAGCCAUCACCAGCGACUAUGUC GUAUGGGUAAAGCGCUUAUUUAUCGG (SEQ ID NO: 9). Exemplary crRNA sequences isolated or derived from Planctomycetes may comprise a sequence of UCUCCGAUAAAUAAGAAGCAUCAAAG (SEQ ID NO: 19). In some embodiments, a CasX reference gNA comprises a sequence at least 60% identical, at least 65% identical, at least 70% identical, at least 75% identical, at least 80% identical, at least 81% identical, at least 82% identical, at least 83% identical, at least 84% identical, at least 85% identical, at least 86% identical, at least 86% identical, at least 87% identical, at least 88% identical, at least 89% identical, at least 89% identical, at least 90% identical, at least 91% identical, at least 92% identical, at least 93% identical, at least 94% identical, at least 95% identical, at least 96% identical, at least 97% identical, at least 98% identical, at least 99% identical, at least 99.5% identical or 100% identical to a sequence isolated or derived from Planctomycetes.

[0139] In some embodiments, a CasX reference gNA comprises a sequence isolated or derived from Candidatus Sungbacteria. In some embodiments, the sequence is a CasX tracrRNA sequence. Exemplary CasX reference tracrRNA sequences isolated or derived from Candidatus Sungbacteria may comprise sequences of: GUUUACACACUCCCUCUCAUAGGGU (SEQ ID NO: 10), GUUUACACACUCCCUCUCAUGAGGU (SEQ ID NO: 11), UUUUACAUACCCCCUCUCAUGGGAU (SEQ ID NO: 12) and GUUUACACACUCCCUCUCAUGGGGG (SEQ ID NO: 13). In some embodiments, a CasX reference guide RNA comprises a sequence at least 60% identical, at least 65% identical, at least 70% identical, at least 75% identical, at least 80% identical, at least 81% identical, at least 82% identical, at least 83% identical, at least 84% identical, at least 85% identical, at least 86% identical, at least 86% identical, at least 87% identical, at least 88% identical, at least 89% identical, at least 89% identical, at least 90% identical, at least 91% identical, at least 92% identical, at least 93% identical, at least 94% identical, at least 95% identical, at least 96% identical, at least 97% identical, at least 98% identical, at least 99% identical, at least 99.5% identical or 100% identical to a sequence isolated or derived from Candidatus sungbacteria.

[0140] Table 2A provides the sequences of reference gRNAs tracr and scaffold sequences. In some embodiments, the disclosure provides gNA sequences wherein the gNA has a scaffold comprising a sequence having at least one nucleotide modification relative to a reference gNA sequence having a sequence of any one of SEQ ID NOS: 4-16 of Table 2A. It will be understood that in those embodiments wherein a vector comprises a DNA encoding sequence for a gNA, or where a gNA is a gDNA or a chimera of RNA and DNA, that thymine (T) bases can be substituted for the uracil (U) bases of any of the gNA sequence embodiments described herein.

TABLE 2A
Reference gRNA tracr and scaffold sequences

| SEQ ID NO. | Nucleotide Sequence |
|---|---|
| 4 | ACAUCUGGCGCGUUUAUUCCAUUACUUUGGAGCCAGUCCCAGCGACUAUGUCG |
| | UAUGGACGAAGCGCUUAUUUAUCGGAGAGAAACCGAUAAGUAAAACGCAUCAA |
| | AG |
| 5 | UACUGGCGCUUUUAUCUCAUUACUUUGAGAGCCAUCACCAGCGACUAUGUCGU |
| | AUGGGUAAAGCGCUUAUUUAUCGGAGAGAAAUCCGAUAAAUAAGAAGCAUCAA |
| | AG |
| 6 | ACAUCUGGCGCGUUUAUUCCAUUACUUUGGAGCCAGUCCCAGCGACUAUGUCG |
| | UAUGGACGAAGCGCUUAUUUAUCGGAGA |
| 7 | ACAUCUGGCGCGUUUAUUCCAUUACUUUGGAGCCAGUCCCAGCGACUAUGUCG |
| | UAUGGACGAAGCGCUUAUUUAUCGG |
| 8 | UACUGGCGCUUUUAUCUCAUUACUUUGAGAGCCAUCACCAGCGACUAUGUCGU |
| | AUGGGUAAAGCGCUUAUUUAUCGGAGA |
| 9 | UACUGGCGCUUUUAUCUCAUUACUUUGAGAGCCAUCACCAGCGACUAUGUCGU |
| | AUGGGUAAAGCGCUUAUUUAUCGG |
| 10 | GUUUACACACUCCCUCUCAUAGGGU |
| 11 | GUUUACACACUCCCUCUCAUGAGGU |
| 12 | UUUUACAUACCCCCUCUCAUGGGAU |
| 13 | GUUUACACACUCCCUCUCAUGGGGG |
| 14 | CCAGCGACUAUGUCGUAUGG |
| 15 | GCGCUUAUUUAUCGGAGAGAAAUCCGAUAAAUAAGAAGC |
| 16 | GGCGCUUUUAUCUCAUUACUUUGAGAGCCAUCACCAGCGACUAUGUCGUAUGG |
| | GUAAAGCGCUUAUUUAUCGGA |

[0141] g. gNA Variants

[0142] In another aspect, the disclosure relates to guide nucleic acid variants (referred to herein alternatively as “gNA variant” or “gRNA variant”), which comprise one or more modifications relative to a reference gRNA scaffold. As used herein, “scaffold” refers to all parts to the gNA necessary for gNA function with the exception of the spacer sequence.

[0143] In some embodiments, a gNA variant comprises one or more nucleotide substitutions, insertions, deletions, or swapped or replaced regions relative to a reference gRNA sequence of the disclosure. In some embodiments, a mutation can occur in any region of a reference gRNA scaffold to produce a gNA variant. In some embodiments, the scaffold of the gNA variant sequence has at least 20%, at least 30%, at least 40%, at least 50%, at least 60%, or at least 70%, at least 80%, at least 85%, at least about 90%, at least about 95%, at least about 96%, at least about 97%, at least about 98%, or at least about 99% identity to the sequence of SEQ ID NO: 4 or SEQ ID NO: 5.

[0144] In some embodiments, a gNA variant comprises one or more nucleotide changes within one or more regions of the reference gRNA that improve a characteristic relative to the reference gRNA. Exemplary regions include the RNA triplex, the pseudoknot, the scaffold stem loop, and the extended stem loop. In some cases, the variant scaffold stem further comprises a bubble. In other cases, the variant scaffold further comprises a triplex loop region. In still other cases, the variant scaffold further comprises a 5′ unstructured region. In one embodiment, the gNA variant scaffold comprises a scaffold stem loop having at least 60% sequence identity to SEQ ID NO: 14. In another embodiment, the gNA variant comprises a scaffold stem loop having the sequence of CCAGCGACUAUGUCGUAGUGG (SEQ ID NO: 20). In another embodiment, the disclosure provides a gNA scaffold comprising, relative to SEQ ID NO: 5, a C18G substitution, a G55 insertion, a U1 deletion, and a modified extended stem loop in which the original 6 nt loop and 13 most-loop-proximal base pairs (32 nucleotides total) are replaced by a Uvsx hairpin (4 nt loop and 5 loop-proximal base pairs; 14 nucleotides total) and the loop-distal base of the extended stem was converted to a fully base-paired stem contiguous with the new Uvsx hairpin by deletion of the A99 and substitution of G64U. In the foregoing embodiment, the gNA scaffold comprises the sequence

(SEQ ID NO: 2238)
ACUGGCGCUUUUAUCUGAUUACUUUGAGAGCCAUCACCAGCGACUAUGUC
GUAGUGGGUAAAGCUCCCUCUUCGGAGGGAGCAUCAAAG.

[0145] All gNA variants that have one or more improved functions or characteristics, or add one or more new functions when the variant gNA is compared to a reference gRNA described herein, are envisaged as within the scope of the disclosure. A representative example of such a gNA variant is guide 174 (SEQ ID NO: 2238), the design of which (and the rationale for the design) is described in the Examples. In some embodiments, the gNA variant adds a new function to the RNP comprising the gNA variant. In some embodiments, the gNA variant has an improved characteristic selected from: improved stability; improved solubility; improved transcription of the gNA; improved resistance to nuclease activity; increased folding rate of the gNA; decreased side product formation during folding; increased productive folding; improved binding affinity to a CasX protein; improved binding affinity to a target DNA when complexed with a CasX protein; improved gene editing when complexed with a CasX protein; improved specificity of editing when complexed with a CasX protein; and improved ability to utilize a greater spectrum of one or more PAM sequences, including ATC, CTC, GTC, or TTC, in the editing of target DNA when complexed with a CasX protein, or any combination thereof. In some cases, the one or more of the improved characteristics of the gNA variant is at least about 1.1 to about 100,000-fold improved relative to the reference gNA of SEQ ID NO: 4 or SEQ ID NO: 5. In other cases, the one or more improved characteristics of the gNA variant is at least about 1.1, at least about 10, at least about 100, at least about 1000, at least about 10,000, at least about 100,000-fold or more improved relative to the reference gNA of SEQ ID NO: 4 or SEQ ID NO: 5. In other cases, the one or more of the improved characteristics of the gNA variant is about 1.1 to 100,00-fold, about 1.1 to 10,00-fold, about 1.1 to 1,000-fold, about 1.1 to 500-fold, about 1.1 to 100-fold, about 1.1 to 50-fold, about 1.1 to 20-fold, about 10 to 100,00-fold, about 10 to 10,00-fold, about 10 to 1,000-fold, about 10 to 500-fold, about 10 to 100-fold, about 10 to 50-fold, about 10 to 20-fold, about 2 to 70-fold, about 2 to 50-fold, about 2 to 30-fold, about 2 to 20-fold, about 2 to 10-fold, about 5 to 50-fold, about 5 to 30-fold, about 5 to 10-fold, about 100 to 100,00-fold, about 100 to 10,00-fold, about 100 to 1,000-fold, about 100 to 500-fold, about 500 to 100,00-fold, about 500 to 10,00-fold, about 500 to 1,000-fold, about 500 to 750-fold, about 1,000 to 100,00-fold, about 10,000 to 100,00-fold, about 20 to 500-fold, about 20 to 250-fold, about 20 to 200-fold, about 20 to 100-fold, about 20 to 50-fold, about 50 to 10,000-fold, about 50 to 1,000-fold, about 50 to 500-fold, about 50 to 200-fold, or about 50 to 100-fold, improved relative to the reference gNA of SEQ ID NO: 4 or SEQ ID NO: 5. In other cases, the one or more improved characteristics of the gNA variant is about 1.1-fold, 1.2-fold, 1.3-fold, 1.4-fold, 1.5-fold, 1.6-fold, 1.7-fold, 1.8-fold, 1.9-fold, 2-fold, 3-fold, 4-fold, 5-fold, 6-fold, 7-fold, 8-fold, 9-fold, 10-fold, 11-fold, 12-fold, 13-fold, 14-fold, 15-fold, 16-fold, 17-fold, 18-fold, 19-fold, 20-fold, 25-fold, 30-fold, 40-fold, 45-fold, 50-fold, 55-fold, 60-fold, 70-fold, 80-fold, 90-fold, 100-fold, 110-fold, 120-fold, 130-fold, 140-fold, 150-fold, 160-fold, 170-fold, 180-fold, 190-fold, 200-fold, 210-fold, 220-fold, 230-fold, 240-fold, 250-fold, 260-fold, 270-fold, 280-fold, 290-fold, 300-fold, 310-fold, 320-fold, 330-fold, 340-fold, 350-fold, 360-fold, 370-fold, 380-fold, 390-fold, 400-fold, 425-fold, 450-fold, 475-fold, or 500-fold improved relative to the reference gNA of SEQ ID NO: 4 or SEQ ID NO: 5.

[0146] In some embodiments, a gNA variant can be created by subjecting a reference gRNA to a one or more mutagenesis methods, such as the mutagenesis methods described herein, below, which may include Deep Mutational Evolution (DME), deep mutational scanning (DMS), error prone PCR, cassette mutagenesis, random mutagenesis, staggered extension PCR, gene shuffling, or domain swapping, in order to generate the gNA variants of the disclosure. The activity of reference gRNAs may be used as a benchmark against which the activity of gNA variants are compared, thereby measuring improvements in function of gNA variants compared to the reference gNA. In other embodiments, a reference gRNA may be subjected to one or more deliberate, targeted mutations, substitutions, or domain swaps in order to produce a gNA variant, for example a rationally designed variant. Exemplary gRNA variants produced by such methods are described in the Examples and representative sequences of gNA scaffolds are presented in Table 2B.

[0147] In some embodiments, the gNA variant comprises one or more modifications compared to a reference guide nucleic acid scaffold sequence, wherein the one or more modification is selected from: at least one nucleotide substitution in a region of the gNA variant; at least one nucleotide deletion in a region of the gNA variant; at least one nucleotide insertion in a region of the gNA variant; a substitution of all or a portion of a region of the gNA variant; a deletion of all or a portion of a region of the gNA variant; or any combination of the foregoing. In some cases, the modification is a substitution of 1 to 15 consecutive or non-consecutive nucleotides in the gNA variant in one or more regions. In other cases, the modification is a deletion of 1 to 10 consecutive or non-consecutive nucleotides in the gNA variant in one or more regions. In other cases, the modification is an insertion of 1 to 10 consecutive or non-consecutive nucleotides in the gNA variant in one or more regions. In other cases, the modification is a substitution of the scaffold stem loop or the extended stem loop with an RNA stem loop sequence from a heterologous RNA source with proximal 5′ and 3′ ends. In some cases, a gNA variant of the disclosure comprises two or more modifications in one region. In other cases, a gNA variant of the disclosure comprises modifications in two or more regions. In other cases, a gNA variant comprises any combination of the foregoing modifications described in this paragraph.

[0148] In some embodiments, a 5′ G is added to a gNA variant sequence for expression in vivo, as transcription from a U6 promoter is more efficient and more consistent with regard to the start site when the +1 nucleotide is a G. In other embodiments, two 5′ Gs are added to a gNA variant sequence for in vitro transcription to increase production efficiency, as T7 polymerase strongly prefers a G in the +1 position and a purine in the +2 position. In some cases, the 5′ G bases are added to the reference scaffolds of Table 2A. In other cases, the 5′ G bases are added to the variant scaffolds of Table 2B.

[0149] Table 2B provides exemplary gNA variant scaffold sequences. In Table 2B, (−) indicates a deletion at the specified position(s) relative to the reference sequence of SEQ ID NO: 5, (+) indicates an insertion of the specified base(s) at the position indicated relative to SEQ ID NO: 5, (:) indicates the range of bases at the specified start:stop coordinates of a deletion or substitution relative to SEQ ID NO: 5, and multiple insertions, deletions or substitutions are separated by commas; e.g., A14C, U17G. In some embodiments, the gNA variant scaffold comprises any one of the sequences listed in Table 2B, SEQ ID NOS: 2101-2280, or a sequence having at least about 50%, at least about 60%, at least about 70%, at least about 80%, at least about 90%, at least about 95%, at least about 95%, at least about 96%, at least about 97%, at least about 98%, at least about 99% sequence identity thereto. It will be understood that in those embodiments wherein a vector comprises a DNA encoding sequence for a gNA, or where a gNA is a gDNA or a chimera of RNA and DNA, that thymine (T) bases can be substituted for the uracil (U) bases of any of the gNA sequence embodiments described herein.

TABLE 2B
Exemplary gNA Scaffold Sequences

| SEQ | | |
|---|---|---|
| ID | NAME or | |
| NO: | Modification | NUCLEOTIDE SEQUENCE |
| 2101 | phage | UACUGGCGCUUUUAUCUCAUUACUUUGAGAGCCAUCACCAGCGACUA |
| | replication | UGUCGUAUGGGUAAAGCGCAGGUGGGACGACCUCUCGGUCGUCCUAU |
| | stable | CUGAAGCAUCAAAG |
| 2102 | Kissing | UACUGGCGCUUUUAUCUCAUUACUUUGAGAGCCAUCACCAGCGACUA |
| | loop_b1 | UGUCGUAUGGGUAAAGCGCUGCUCGACGCGUCCUCGAGCAGAAGCAU |
| | | CAAAG |
| 2103 | Kissing | UACUGGCGCUUUUAUCUCAUUACUUUGAGAGCCAUCACCAGCGACUA |
| | loop_a | UGUCGUAUGGGUAAAGCGCUGCUCGCUCCGUUCGAGCAGAAGCAUCA |
| | | AAG |
| 2104 | 32: uvsX | GUACUGGCGCUUUUAUCUCAUUACUUUGAGAGCCAUCACCAGCGACU |
| | hairpin | AUGUCGUAUGGGUAAAGCGCCCUCUUCGGAGGGAAGCAUCAAAG |
| 2105 | PP7 | UACUGGCGCUUUUAUCUCAUUACUUUGAGAGCCAUCACCAGCGACUA |
| | | UGUCGUAUGGGUAAAGCGCAGGAGUUUCUAUGGAAACCCUGAAGCAU |
| | | CAAAG |
| 2106 | 64: trip mut, | GUACUGGCGCCUUUAUCUCAUUACUUUGAGAGCCAUCACCAGCGACU |
| | extended stem | AUGUCGUAUGGGUAAAGCGCUUACGGACUUCGGUCCGUAAGAAGCAU |
| | truncation | CAG |
| 2107 | hyperstable | UACUGGCGCUUUUAUCUCAUUACUUUGAGAGCCAUCACCAGCGACUA |
| | tetraloop | UGUCGUAUGGGUAAAGCGCUGCGCUUGCGCAGAAGCAUCAAAG |
| 2108 | C18G | UACUGGCGCUUUUAUCUGAUUACUUUGAGAGCCAUCACCAGCGACUA |
| | | UGUCGUAUGGGUAAAGCGCUUAUUUAUCGGAGAGAAAUCCGAUAAAU |
| | | AAGAAGCAUCAAAG |
| 2109 | U17G | UACUGGCGCUUUUAUCGCAUUACUUUGAGAGCCAUCACCAGCGACUA |
| | | UGUCGUAUGGGUAAAGCGCUUAUUUAUCGGAGAGAAAUCCGAUAAAU |
| | | AAGAAGCAUCAAAG |
| 2110 | CUUCGG | UACUGGCGCUUUUAUCUCAUUACUUUGAGAGCCAUCACCAGCGACUA |
| | loop | UGUCGUAUGGGUAAAGCGCUUAUUUAUCGGAGACUUCGGUCCGAUAA |
| | | AUAAGAAGCAUCAAAG |
| 2111 | MS2 | UACUGGCGCUUUUAUCUCAUUACUUUGAGAGCCAUCACCAGCGACUA |
| | | UGUCGUAUGGGUAAAGCGCACAUGAGGAUUACCCAUGUGAAGCAUCA |
| | | AAG |
| 2112 | -1, A2G, -78, | GCUGGCGCUUUUAUCUCAUUACUUUGAGAGCCAUCACCAGCGACUAU |
| | G77U | GUCGUAUGGGUAAAGCGCUUAUUUAUCGUGAGAAAUCCGAUAAAUAA |
| | | GAAGCAUCAAAG |
| 2113 | QB | UACUGGCGCUUUUAUCUCAUUACUUUGAGAGCCAUCACCAGCGACUA |
| | | UGUCGUAUGGGUAAAGCGCUGCAUGUCUAAGACAGCAGAAGCAUCAA |
| | | AG |
| 2114 | 45, 44 hairpin | UACUGGCGCUUUUAUCUCAUUACUUUGAGAGCCAUCACCAGCGACUA |
| | | UGUCGUAUGGGUAAAGCGCAGGGCUUCGGCCGAAGCAUCAAAG |
| 2115 | U1A | UACUGGCGCUUUUAUCUCAUUACUUUGAGAGCCAUCACCAGCGACUA |
| | | UGUCGUAUGGGUAAAGCGCAAUCCAUUGCACUCCGGAUUGAAGCAUC |
| | | AAAG |
| 2116 | A14C, U17G | UACUGGCGCUUUUCUCGCAUUACUUUGAGAGCCAUCACCAGCGACUA |
| | | UGUCGUAUGGGUAAAGCGCUUAUUUAUCGGAGAGAAAUCCGAUAAAU |
| | | AAGAAGCAUCAAAG |
| 2117 | CUUCGG | UACUGGCGCUUUUAUCUCAUUACUUUGAGAGCCAUCACCAGCGACUA |
| | loop modified | UGUCGUAUGGGUAAAGCGCUUAUUUAUCGGACUUCGGUCCGAUAAAU |
| | | AAGAAGCAUCAAAG |
| 2118 | Kissing | UACUGGCGCUUUUAUCUCAUUACUUUGAGAGCCAUCACCAGCGACUA |
| | loop_b2 | UGUCGUAUGGGUAAAGCGCUGCUCGUUUGCGGCUACGAGCAGAAGCA |
| | | UCAAAG |
| 2119 | -76:78, -83:87 | UACUGGCGCUUUUAUCUCAUUACUUUGAGAGCCAUCACCAGCGACUA |
| | | UGUCGUAUGGGUAAAGCGCUUAUUUAUCGAGAGAUAAAUAAGAAGCA |
| | | UCAAAG |
| 2120 | -4 | UACGGCGCUUUUAUCUCAUUACUUUGAGAGCCAUCACCAGCGACUAU |
| | | GUCGUAUGGGUAAAGCGCUUAUUUAUCGGAGAGAAAUCCGAUAAAUA |
| | | AGAAGCAUCAAAG |
| 2121 | extended stem | UACUGGCGCCUUUUAUCUCAUUACUUUGAGAGCCAUCACCAGCGACU |
| | truncation | AUGUCGUAUGGGUAAAGCGCUUACGGACUUCGGUCCGUAAGAAGCAU |
| | | CAAAG |
| 2122 | C55 | UACUGGCGCUUUUAUCUCAUUACUUUGAGAGCCAUCACCAGCGACUA |
| | | UGUCGUAUCGGUAAAGCGCUUAUUUAUCGGAGAGAAAUCCGAUAAAU |
| | | AAGAAGCAUCAAAG |
| 2123 | trip mut | UACUGGCGCCUUUAUCUCAUUACUUUGAGAGCCAUCACCAGCGACUA |
| | | UGUCGUAUGGGUAAAGCGCUUAUUUAUCGGACUUCGGUCCGAUAAAU |
| | | AAGAAGCAUCAAAG |
| 2124 | -76:78 | UACUGGCGCUUUUAUCUCAUUACUUUGAGAGCCAUCACCAGCGACUA |
| | | UGUCGUAUGGGUAAAGCGCUUAUUUAUCGAGAAAUCCGAUAAAUAAG |
| | | AAGCAUCAAAG |
| 2125 | -1:5 | GCGCUUUUAUCUCAUUACUUUGAGAGCCAUCACCAGCGACUAUGUCG |
| | | UAUGGGUAAAGCGCUUAUUUAUCGGAGAGAAAUCCGAUAAAUAAGAA |
| | | GCAUCAAAG |
| 2126 | -83:87 | UACUGGCGCUUUUAUCUCAUUACUUUGAGAGCCAUCACCAGCGACUA |
| | | UGUCGUAUGGGUAAAGCGCUUAUUUAUCGGAGAGAGAUAAAUAAGAA |
| | | GCAUCAAAG |
| 2127 | =+G28, | UACUGGCGCUUUUAUCUCAUUACUUUGGAGAGCCAUCACCAGCGACU |
| | A82U, -84, | AUGUCGUAUGGGUAAAGCGCUUAUUUAUCGGAGAGUAUCCGAUAAAU |
| | | AAGAAGCAUCAAAG |
| 2128 | =+51U | UACUGGCGCUUUUAUCUCAUUACUUUGAGAGCCAUCACCAGCGACUA |
| | | UGUUCGUAUGGGUAAAGCGCUUAUUUAUCGGAGAGAAAUCCGAUAAA |
| | | UAAGAAGCAUCAAAG |
| 2129 | -1:4, +G5A, | AGCGCUUUUAUCUCAUUACUUUGAGAGCCAUCACCAGCGACUAUGUC |
| | +G86, | GUAUGGGUAAAGCGCUUAUUUAUCGGAGAGAAAUGCCGAUAAAUAAG |
| | | AAGCAUCAAAG |
| 2130 | =+A94 | UACUGGCGCUUUUAUCUCAUUACUUUGAGAGCCAUCACCAGCGACUA |
| | | UGUCGUAUGGGUAAAGCGCUUAUUUAUCGGAGAGAAAUCCGAUAAAA |
| | | UAAGAAGCAUCAAAG |
| 2131 | =+G72 | UACUGGCGCUUUUAUCUCAUUACUUUGAGAGCCAUCACCAGCGACUA |
| | | UGUCGUAUGGGUAAAGCGCUUAUUGUAUCGGAGAGAAAUCCGAUAAA |
| | | UAAGAAGCAUCAAAG |
| 2132 | shorten front, | GCGCUUUUAUCUCAUUACUUUGAGAGCCAUCACCAGCGACUAUGUCG |
| | CUUCGG | UAUGGGUAAAGCGCUUAUUUAUCGGACUUCGGUCCGAUAAAUAAGCG |
| | loop modified. | CAUCAAAG |
| | extend | |
| | extended | |
| 2133 | A14C | UACUGGCGCUUUUCUCUCAUUACUUUGAGAGCCAUCACCAGCGACUA |
| | | UGUCGUAUGGGUAAAGCGCUUAUUUAUCGGAGAGAAAUCCGAUAAAU |
| | | AAGAAGCAUCAAAG |
| 2134 | -1:3, +G3 | GUGGCGCUUUUAUCUCAUUACUUUGAGAGCCAUCACCAGCGACUAUG |
| | | UCGUAUGGGUAAAGCGCUUAUUUAUCGGAGAGAAAUCCGAUAAAUAA |
| | | GAAGCAUCAAAG |
| 2135 | =+C45, +U46 | UACUGGCGCUUUUAUCUCAUUACUUUGAGAGCCAUCACCAGCGACCU |
| | | UAUGUCGUAUGGGUAAAGCGCUUAUUUAUCGGAGAGAAAUCCGAUAA |
| | | AUAAGAAGCAUCAAAG |
| 2136 | CUUCGG | GAUGGCGCUUUUAUCUCAUUACUUUGAGAGCCAUCACCAGCGACUAU |
| | loop modified, | GUCGUAUGGGUAAAGCGCUUAUUUAUCGGACUUCGGUCCGAUAAAUA |
| | fun start | AGAAGCAUCAAAG |
| 2137 | -93:94 | UACUGGCGCUUUUAUCUCAUUACUUUGAGAGCCAUCACCAGCGACUA |
| | | UGUCGUAUGGGUAAAGCGCUUAUUUAUCGGAGAGAAAUCCGAUAAAA |
| | | GAAGCAUCAAAG |
| 2138 | =+U45 | UACUGGCGCUUUUAUCUCAUUACUUUGAGAGCCAUCACCAGCGAUCU |
| | | AUGUCGUAUGGGUAAAGCGCUUAUUUAUCGGAGAGAAAUCCGAUAAA |
| | | UAAGAAGCAUCAAAG |
| 2139 | -69, -94 | UACUGGCGCUUUUAUCUCAUUACUUUGAGAGCCAUCACCAGCGACUA |
| | | UGUCGUAUGGGUAAAGGCUUAUUUAUCGGAGAGAAAUCCGAUAAAAA |
| | | GAAGCAUCAAAG |
| 2140 | -94 | UACUGGCGCUUUUAUCUCAUUACUUUGAGAGCCAUCACCAGCGACUA |
| | | UGUCGUAUGGGUAAAGCGCUUAUUUAUCGGAGAGAAAUCCGAUAAAA |
| | | AGAAGCAUCAAAG |
| 2141 | modified | UACUGGCGCUUUAUCUCAUUACUUUGAGAGCCAUCACCAGCGACUAU |
| | CUUCGG, | GUCGUAUGGGUAAAGCGCUUAUUUAUCGGACUUCGGUCCGAUAAAUA |
| | minus U in 1st | AGAAGCAUCAAAG |
| | triplex | |
| 2142 | -1:4, +C4, | CGGCGCUUUUCUCGCAUUACUUUGAGAGCCAUCACCAGCGACUAUGU |
| | A14C, U17G, | CGUAUGGGUAAAGCGCUUAUUGUAUCGAGAGAUAAAUAAGAAGCAUC |
| | +G72, -76:78, | AAAG |
| | -83:87 | |
| 2143 | U1C, -73 | CACUGGCGCUUUUAUCUCAUUACUUUGAGAGCCAUCACCAGCGACUA |
| | | UGUCGUAUGGGUAAAGCGCUUAUUUUCGGAGAGAAAUCCGAUAAAUA |
| | | AGAAGCAUCAAAG |
| 2144 | Scaffold | UACUGGCGCUUUAUCUCAUUACUUUGAGAGCCAUCACCAGCGACUUC |
| | uuCG, stem | GGUCGUAUGGGUAAAGCGCUUAUGUAUCGGCUUCGGCCGAUACAUAA |
| | uuCG. Stem | GAAGCAUCAAAG |
| | swap, t | |
| | shorten | |
| 2145 | Scaffold | UACUGGCGCUUUUAUCUCAUUACUUUGAGAGCCAUCACCAGCGACUU |
| | uuCG, stem | CGGUCGUAUGGGUAAAGCGCUUAUGUAUCGGCUUCGGCCGAUACAUA |
| | uuCG. Stem | AGAAGCAUCAAAG |
| | swap | |
| 2146 | =+G60 | UACUGGCGCUUUUAUCUCAUUACUUUGAGAGCCAUCACCAGCGACUA |
| | | UGUCGUAUGGGUGAAAGCGCUUAUUUAUCGGAGAGAAAUCCGAUAAA |
| | | UAAGAAGCAUCAAAG |
| 2147 | no stem | UACUGGCGCUUUUAUCUCAUUACUUUGAGAGCCAUCACCAGCGACUU |
| | Scaffold | CGGUCGUAUGGGUAAAG |
| | uuCG | |
| 2148 | no stem | GAUGGGCUUUUAUCUCAUUACUUUGAGAGCCAUCACCAGCGACUUCG |
| | Scaffold | GUCGUAUGGGUAAAG |
| | uuCG, fun | |
| | start | |
| 2149 | Scaffold | GAUGGGCUUUUAUCUCAUUACUUUGAGAGCCAUCACCAGCGACUUCG |
| | uuCG, stem | GUCGUAUGGGUAAAGCGCUUAUUUAUCGGCUUCGGCCGAUAAAUAAG |
| | uuCG, fun | AAGCAUCAAAG |
| | start | |
| 2150 | Pseudoknots | UACUGGCGCUUUUAUCUCAUUACUUUGAGAGCCAUCACCAGCGACUA |
| | | UGUCGUAUGGGUAAAGCGCUACACUGGGAUCGCUGAAUUAGAGAUCG |
| | | GCGUCCUUUCAUUCUAUAUACUUUGGAGUUUUAAAAUGUCUCUAAGU |
| | | ACAGAAGCAUCAAAG |
| 2151 | Scaffold | GGCGCUUUUAUCUCAUUACUUUGAGAGCCAUCACCAGCGACUUCGGU |
| | uuCG, stem | CGUAUGGGUAAAGCGCUUAUUUAUCGGCUUCGGCCGAUAAAUAAGAA |
| | uuCG | GCAUCAAAG |
| 2152 | Scaffold | GCUGGCGCUUUUAUCUCAUUACUUUGAGAGCCAUCACCAGCGACUUC |
| | uuCG, stem | GGUCGUAUGGGUAAAGCGCUUAUUUAUCGGCUUCGGCCGAUAAAUAA |
| | uuCG, no start | GAAGCAUCAAAG |
| 2153 | Scaffold | UACUGGCGCUUUUAUCUCAUUACUUUGAGAGCCAUCACCAGCGACUU |
| | uuCG | CGGUCGUAUGGGUAAAGCGCUUAUUUAUCGGAGAGAAAUCCGAUAAA |
| | | UAAGAAGCAUCAAAG |
| 2154 | =+GCUC36 | UACUGGCGCUUUUAUCUCAUUACUUUGAGAGCCAUGCUCCACCAGCG |
| | | ACUAUGUCGUAUGGGUAAAGCGCUUAUUUAUCGGAGAGAAAUCCGAU |
| | | AAAUAAGAAGCAUCAAAG |
| 2155 | G quadriplex | UACUGGCGCUUUUAUCUCAUUACUUUGAGAGCCAUCACCAGCGACUA |
| | telomere | UGUCGUAUGGGUAAAGCGGGGUUAGGGUUAGGGUUAGGGAAGCAUCA |
| | basket+ ends | AAG |
| 2156 | G quadriplex | UACUGGCGCUUUUAUCUCAUUACUUUGAGAGCCAUCACCAGCGACUA |
| | M3q | UGUCGUAUGGGUAAAGCGGAGGGAGGGAGGGAGAGGGAAAGCAUCAA |
| | | AG |
| 2157 | G quadriplex | UACUGGCGCUUUUAUCUCAUUACUUUGAGAGCCAUCACCAGCGACUA |
| | telomere | UGUCGUAUGGGUAAAGCGUUGGGUUAGGGUUAGGGUUAGGGAAAAGC |
| | basket no ends | AUCAAAG |
| 2158 | 45, 44 hairpin | UACUGGCGCUUUUAUCUCAUUACUUUGAGAGCCAUCACCAGCGACUA |
| | (old version) | UGUCGUAUGGGUAAAGCGC--------AGGGCUUCGGCCG------- |
| | | --GAAGCAUCAAAG |
| 2159 | Sarcin-ricin | UACUGGCGCUUUUAUCUCAUUACUUUGAGAGCCAUCACCAGCGACUA |
| | loop | UGUCGUAUGGGUAAAGCGCCUGCUCAGUACGAGAGGAACCGCAGGAA |
| | | GCAUCAAAG |
| 2160 | uvsX, C18G | UACUGGCGCUUUUAUCUGAUUACUUUGAGAGCCAUCACCAGCGACUA |
| | | UGUCGUAUGGGUAAAGCGCCCUCUUCGGAGGGAAGCAUCAAAG |
| 2161 | truncated stem | UACUGGCGCCUUUAUCUGAUUACUUUGAGAGCCAUCACCAGCGACUA |
| | loop, C18G, | UGUCGUAUGGGUAAAGCGCUUACGGACUUCGGUCCGUAAGAAGCAUC |
| | trip mut | AAAG |
| | (U10C) | |
| 2162 | short phage | UACUGGCGCUUUUAUCUGAUUACUUUGAGAGCCAUCACCAGCGACUA |
| | rep, C18G | UGUCGUAUGGGUAAAGCGCGGACGACCUCUCGGUCGUCCGAAGCAUC |
| | | AAAG |
| 2163 | phage rep | UACUGGCGCUUUUAUCUGAUUACUUUGAGAGCCAUCACCAGCGACUA |
| | loop, C18G | UGUCGUAUGGGUAAAGCGCAGGUGGGACGACCUCUCGGUCGUCCUAU |
| | | CUGAAGCAUCAAAG |
| 2164 | =+G18, | UACUGGCGCCUUUAUCUGCAUUACUUUGAGAGCCAUCACCAGCGACU |
| | stacked onto | AUGUCGUAUGGGUAAAGCGCUUACGGACUUCGGUCCGUAAGAAGCAU |
| | 64 | CAG |
| 2165 | truncated stem | GCUGGCGCUUUUAUCUGAUUACUUUGAGAGCCAUCACCAGCGACUAU |
| | loop, C18G, | GUCGUAUGGGUAAAGCGCUUACGGACUUCGGUCCGUAAGAAGCAUCA |
| | -1 A2G | AAG |
| 2166 | phage rep | UACUGGCGCCUUUAUCUGAUUACUUUGAGAGCCAUCACCAGCGACUA |
| | loop, C18G, | UGUCGUAUGGGUAAAGCGCAGGUGGGACGACCUCUCGGUCGUCCUAU |
| | trip mut | CUGAAGCAUCAAAG |
| | (U10C) | |
| 2167 | short phage | UACUGGCGCCUUUAUCUGAUUACUUUGAGAGCCAUCACCAGCGACUA |
| | rep, C18G, | UGUCGUAUGGGUAAAGCGCGGACGACCUCUCGGUCGUCCGAAGCAUC |
| | trip mut | AAAG |
| | (U10C) | |
| 2168 | uvsX, trip mut | UACUGGCGCCUUUAUCUCAUUACUUUGAGAGCCAUCACCAGCGACUA |
| | (U10C) | UGUCGUAUGGGUAAAGCGCCCUCUUCGGAGGGAAGCAUCAAAG |
| 2169 | truncated stem | UACUGGCGCUUUUAUCUCAUUACUUUGAGAGCCAUCACCAGCGACUA |
| | loop | UGUCGUAUGGGUAAAGCGCUUACGGACUUCGGUCCGUAAGAAGCAUC |
| | | AAAG |
| 2170 | =+A17, | UACUGGCGCCUUUAUCAUCAUUACUUUGAGAGCCAUCACCAGCGACU |
| | stacked onto | AUGUCGUAUGGGUAAAGCGCUUACGGACUUCGGUCCGUAAGAAGCAU |
| | 64 | CAG |
| 2171 | 3′ HDV | UACUGGCGCUUUUAUCUCAUUACUUUGAGAGCCAUCACCAGCGACUA |
| | genomic | UGUCGUAUGGGUAAAGCGCUUAUUUAUCGGAGAGAAAUCCGAUAAAU |
| | ribozyme | AAGAAGCAUCAAAGGGCCGGCAUGGUCCCAGCCUCCUCGCUGGCGCC |
| | | GGCUGGGCAACAUUCCGAGGGGACCGUCCCCUCGGUAAUGGCGAAUG |
| | | GGACCC |
| 2172 | phage rep | UACUGGCGCCUUUAUCUCAUUACUUUGAGAGCCAUCACCAGCGACUA |
| | loop, trip mut | UGUCGUAUGGGUAAAGCGCAGGUGGGACGACCUCUCGGUCGUCCUAU |
| | (U10C) | CUGAAGCAUCAAAG |
| 2173 | -79:80 | UACUGGCGCUUUUAUCUCAUUACUUUGAGAGCCAUCACCAGCGACUA |
| | | UGUCGUAUGGGUAAAGCGCUUAUUUAUCGGAGAAAUCCGAUAAAUAA |
| | | GAAGCAUCAAAG |
| 2174 | short phage | UACUGGCGCCUUUAUCUCAUUACUUUGAGAGCCAUCACCAGCGACUA |
| | rep, trip mut | UGUCGUAUGGGUAAAGCGCGGACGACCUCUCGGUCGUCCGAAGCAUC |
| | (U10C) | AAAG |
| 2175 | extra | UACUGGCGCUUUUAUCUCAUUACUUUGAGAGCCAUCACCAGCGACUA |
| | truncated stem | UGUCGUAUGGGUAAAGCGCCGGACUUCGGUCCGGAAGCAUCAAAG |
| | loop | |
| 2176 | U17G, C18G | UACUGGCGCUUUUAUCGGAUUACUUUGAGAGCCAUCACCAGCGACUA |
| | | UGUCGUAUGGGUAAAGCGCUUAUUUAUCGGAGAGAAAUCCGAUAAAU |
| | | AAGAAGCAUCAAAG |
| 2177 | short phage | UACUGGCGCUUUUAUCUCAUUACUUUGAGAGCCAUCACCAGCGACUA |
| | rep | UGUCGUAUGGGUAAAGCGCGGACGACCUCUCGGUCGUCCGAAGCAUC |
| | | AAAG |
| 2178 | uvsX, C18G, | GCUGGCGCUUUUAUCUGAUUACUUUGAGAGCCAUCACCAGCGACUAU |
| | -1 A2G | GUCGUAUGGGUAAAGCGCCCUCUUCGGAGGGAAGCAUCAAAG |
| 2179 | uvsX, C18G, | GCUGGCGCCUUUAUCUGAUUACUUUGAGAGCCAUCACCAGCGACUAU |
| | trip mut | GUCGUAUGGGUAAAGCUCCCUCUUCGGAGGGAGCAUCAAAG |
| | (U10C), -1 | |
| | A2G, HDV - | |
| | 99 G65U | |
| 2180 | 3′ HDV | UACUGGCGCUUUUAUCUCAUUACUUUGAGAGCCAUCACCAGCGACUA |
| | antigenomic | UGUCGUAUGGGUAAAGCGCUUAUUUAUCGGAGAGAAAUCCGAUAAAU |
| | ribozyme | AAGAAGCAUCAAAGGGGUCGGCAUGGCAUCUCCACCUCCUCGCGGUC |
| | | CGACCUGGGCAUCCGAAGGAGGACGCACGUCCACUCGGAUGGCUAAG |
| | | GGAGAGCCA |
| 2181 | uvsX, C18G, | GCUGGCGCCUUUAUCUGAUUACUUUGAGAGCCAUCACCAGCGACUAU |
| | trip mut | GUCGUAUGGGUAAAGCGCCCUCUUCGGAGGGCGCAUCAAAG |
| | (U10C), -1 | |
| | A2G, HDV | |
| | AA(98:99)C | |
| 2182 | 3′ HDV | UACUGGCGCUUUUAUCUCAUUACUUUGAGAGCCAUCACCAGCGACUA |
| | ribozyme | UGUCGUAUGGGUAAAGCGCUUAUUUAUCGGAGAGAAAUCCGAUAAAU |
| | (Lior Nissim, | AAGAAGCAUCAAAGUUUUGGCCGGCAUGGUCCCAGCCUCCUCGCUGG |
| | Timothy Lu) | CGCCGGCUGGGCAACAUGCUUCGGCAUGGCGAAUGGGACCCCGGG |
| 2183 | TAC(1:3)GA, | GAUGGCGCCUUUAUCUCAUUACUUUGAGAGCCAUCACCAGCGACUAU |
| | stacked onto | GUCGUAUGGGUAAAGCGCUUACGGACUUCGGUCCGUAAGAAGCAUCA |
| | 64 | AAG |
| 2184 | uvsX, -1 A2G | GCUGGCGCUUUUAUCUCAUUACUUUGAGAGCCAUCACCAGCGACUAU |
| | | GUCGUAUGGGUAAAGCGCCCUCUUCGGAGGGAAGCAUCAAAG |
| 2185 | truncated stem | GCUGGCGCCUUUAUCUGAUUACUUUGAGAGCCAUCACCAGCGACUAU |
| | loop, C18G, | GUCGUAUGGGUAAAGCUCUUACGGACUUCGGUCCGUAAGAGCAUCAA |
| | trip mut | AG |
| | (U10C), -1 | |
| | A2G, HDV - | |
| | 99 G65U | |
| 2186 | short phage | GCUGGCGCCUUUAUCUGAUUACUUUGAGAGCCAUCACCAGCGACUAU |
| | rep, C18G, | GUCGUAUGGGUAAAGCUCGGACGACCUCUCGGUCGUCCGAGCAUCAA |
| | trip mut | AG |
| | (U10C), -1 | |
| | A2G, HDV - | |
| | 99 G65U | |
| 2187 | 3′ sTRSV WT | UACUGGCGCUUUUAUCUCAUUACUUUGAGAGCCAUCACCAGCGACUA |
| | viral | UGUCGUAUGGGUAAAGCGCUUAUUUAUCGGAGAGAAAUCCGAUAAAU |
| | Hammerhead | AAGAAGCAUCAAAGCCUGUCACCGGAUGUGCUUUCCGGUCUGAUGAG |
| | ribozyme | UCCGUGAGGACGAAACAGG |
| 2188 | short phage | GCUGGCGCUUUUAUCUGAUUACUUUGAGAGCCAUCACCAGCGACUAU |
| | rep, C18G, -1 | GUCGUAUGGGUAAAGCGCGGACGACCUCUCGGUCGUCCGAAGCAUCA |
| | A2G | AAG |
| 2189 | short phage | GCUGGCGCCUUUAUCUGAUUACUUUGAGAGCCAUCACCAGCGACUAU |
| | rep, C18G, | GUCGUAUGGGUAAAGCGCGGACGACCUCUCGGUCGUCCGAAGCAUCA |
| | trip mut | AAG |
| | (U10C), -1 | |
| | A2G, 3′ | |
| | genomic HDV | |
| 2190 | phage rep | GCUGGCGCCUUUAUCUGAUUACUUUGAGAGCCAUCACCAGCGACUAU |
| | loop, C18G, | GUCGUAUGGGUAAAGCUCAGGUGGGACGACCUCUCGGUCGUCCUAUC |
| | trip mut | UGAGCAUCAAAG |
| | (U10C), -1 | |
| | A2G, HDV - | |
| | 99 G65U | |
| 2191 | 3′ HDV | UACUGGCGCUUUUAUCUCAUUACUUUGAGAGCCAUCACCAGCGACUA |
| | ribozyme | UGUCGUAUGGGUAAAGCGCUUAUUUAUCGGAGAGAAAUCCGAUAAAU |
| | (Owen Ryan, | AAGAAGCAUCAAAGGAUGGCCGGCAUGGUCCCAGCCUCCUCGCUGGC |
| | Jamie Cate) | GCCGGCUGGGCAACACCUUCGGGUGGCGAAUGGGAC |
| 2192 | phage rep | GCUGGCGCUUUUAUCUGAUUACUUUGAGAGCCAUCACCAGCGACUAU |
| | loop, C18G, | GUCGUAUGGGUAAAGCGCAGGUGGGACGACCUCUCGGUCGUCCUAUC |
| | -1 A2G | UGAAGCAUCAAAG |
| 2193 | 0.14 | UACUGGCGCUUUUAUCUCAUUACUUUGAGAGCCAUCACCAGCGACUA |
| | | UGUCGUACUGGGUAAAGCGCUUAUUUAUCGGAGAGAAAUCCGAUAAA |
| | | UAAGAAGCAUCAAAG |
| 2194 | -78, G77U | UACUGGCGCUUUUAUCUCAUUACUUUGAGAGCCAUCACCAGCGACUA |
| | | UGUCGUAUGGGUAAAGCGCUUAUUUAUCGUGAGAAAUCCGAUAAAUA |
| | | AGAAGCAUCAAAG |
| 2195 | | GUACUGGCGCUUUUAUCUCAUUACUUUGAGAGCCAUCACCAGCGACU |
| | | AUGUCGUAUGGGUAAAGCGCUUAUUUAUCGGAGAGAAAUCCGAUAAA |
| | | UAAGAAGCAUCAAAG |
| 2196 | short phage | GCUGGCGCUUUUAUCUCAUUACUUUGAGAGCCAUCACCAGCGACUAU |
| | rep, -1 A2G | GUCGUAUGGGUAAAGCGCGGACGACCUCUCGGUCGUCCGAAGCAUCA |
| | | AAG |
| 2197 | truncated stem | GCUGGCGCCUUUAUCUGAUUACUUUGAGAGCCAUCACCAGCGACUAU |
| | loop, C18G, | GUCGUAUGGGUAAAGCGCUUACGGACUUCGGUCCGUAAGAAGCAUCA |
| | trip mut | AAG |
| | (U10C), -1 | |
| | A2G | |
| 2198 | -1, A2G | GCUGGCGCUUUUAUCUCAUUACUUUGAGAGCCAUCACCAGCGACUAU |
| | | GUCGUAUGGGUAAAGCGCUUAUUUAUCGGAGAGAAAUCCGAUAAAUA |
| | | AGAAGCAUCAAAG |
| 2199 | truncated stem | GCUGGCGCCUUUAUCUCAUUACUUUGAGAGCCAUCACCAGCGACUAU |
| | loop, trip mut | GUCGUAUGGGUAAAGCGCUUACGGACUUCGGUCCGUAAGAAGCAUCA |
| | (U10C), -1 | AAG |
| | A2G | |
| 2200 | uvsX, C18G, | GCUGGCGCCUUUAUCUGAUUACUUUGAGAGCCAUCACCAGCGACUAU |
| | trip mut | GUCGUAUGGGUAAAGCGCCCUCUUCGGAGGGAAGCAUCAAAG |
| | (U10C), -1 | |
| | A2G | |
| 2201 | phage rep | GCUGGCGCUUUUAUCUCAUUACUUUGAGAGCCAUCACCAGCGACUAU |
| | loop, -1 A2G | GUCGUAUGGGUAAAGCGCAGGUGGGACGACCUCUCGGUCGUCCUAUC |
| | | UGAAGCAUCAAAG |
| 2202 | phage rep | GCUGGCGCCUUUAUCUCAUUACUUUGAGAGCCAUCACCAGCGACUAU |
| | loop, trip mut | GUCGUAUGGGUAAAGCGCAGGUGGGACGACCUCUCGGUCGUCCUAUC |
| | (U10C), -1 | UGAAGCAUCAAAG |
| | A2G | |
| 2203 | phage rep | GCUGGCGCCUUUAUCUGAUUACUUUGAGAGCCAUCACCAGCGACUAU |
| | loop, C18G, | GUCGUAUGGGUAAAGCGCAGGUGGGACGACCUCUCGGUCGUCCUAUC |
| | trip mut | UGAAGCAUCAAAG |
| | (U10C), -1 | |
| | A2G | |
| 2204 | truncated stem | UACUGGCGCUUUUAUCUGAUUACUUUGAGAGCCAUCACCAGCGACUA |
| | loop, C18G | UGUCGUAUGGGUAAAGCGCUUACGGACUUCGGUCCGUAAGAAGCAUC |
| | | AAAG |
| 2205 | uvsX, trip mut | GCUGGCGCCUUUAUCUCAUUACUUUGAGAGCCAUCACCAGCGACUAU |
| | (U10C), -1 | GUCGUAUGGGUAAAGCGCCCUCUUCGGAGGGAAGCAUCAAAG |
| | A2G | |
| 2206 | truncated stem | GCUGGCGCUUUUAUCUCAUUACUUUGAGAGCCAUCACCAGCGACUAU |
| | loop, -1 A2G | GUCGUAUGGGUAAAGCGCUUACGGACUUCGGUCCGUAAGAAGCAUCA |
| | | AAG |
| 2207 | short phage | GCUGGCGCCUUUAUCUCAUUACUUUGAGAGCCAUCACCAGCGACUAU |
| | rep, trip mut | GUCGUAUGGGUAAAGCGCGGACGACCUCUCGGUCGUCCGAAGCAUCA |
| | (U10C), -1 | AAG |
| | A2G | |
| 2208 | 5′HDV | GAUGGCCGGCAUGGUCCCAGCCUCCUCGCUGGCGCCGGCUGGGCAAC |
| | ribozyme | ACCUUCGGGUGGCGAAUGGGACUACUGGCGCUUUUAUCUCAUUACUU |
| | (Owen Ryan, | UGAGAGCCAUCACCAGCGACUAUGUCGUAUGGGUAAAGCGCUUAUUU |
| | Jamie Cate) | AUCGGAGAGAAAUCCGAUAAAUAAGAAGCAUCAAAG |
| 2209 | 5′HDV | GGCCGGCAUGGUCCCAGCCUCCUCGCUGGCGCCGGCUGGGCAACAUU |
| | genomic | CCGAGGGGACCGUCCCCUCGGUAAUGGCGAAUGGGACCCUACUGGCG |
| | ribozyme | CUUUUAUCUCAUUACUUUGAGAGCCAUCACCAGCGACUAUGUCGUAU |
| | | GGGUAAAGCGCUUAUUUAUCGGAGAGAAAUCCGAUAAAUAAGAAGCA |
| | | UCAAAG |
| 2210 | truncated stem | GCUGGCGCCUUUAUCUGAUUACUUUGAGAGCCAUCACCAGCGACUAU |
| | loop, C18G, | GUCGUAUGGGUAAAGCGCUUACGGACUUCGGUCCGUAAGCGCAUCAA |
| | trip mut | AG |
| | (U10C), -1 | |
| | A2G, HDV | |
| | AA(98:99)C | |
| 2211 | 5′ env25 pistol | CGUGGUUAGGGCCACGUUAAAUAGUUGCUUAAGCCCUAAGCGUUGAU |
| | ribozyme | CUUCGGAUCAGGUGCAAUACUGGCGCUUUUAUCUCAUUACUUUGAGA |
| | (with an added | GCCAUCACCAGCGACUAUGUCGUAUGGGUAAAGCGCUUAUUUAUCGG |
| | CUUCGG | AGAGAAAUCCGAUAAAUAAGAAGCAUCAAAG |
| | loop) | |
| 2212 | 5′HDV | GGGUCGGCAUGGCAUCUCCACCUCCUCGCGGUCCGACCUGGGCAUCC |
| | antigenomic | GAAGGAGGACGCACGUCCACUCGGAUGGCUAAGGGAGAGCCAUACUG |
| | ribozyme | GCGCUUUUAUCUCAUUACUUUGAGAGCCAUCACCAGCGACUAUGUCG |
| | | UAUGGGUAAAGCGCUUAUUUAUCGGAGAGAAAUCCGAUAAAUAAGAA |
| | | GCAUCAAAG |
| 2213 | 3′ | UACUGGCGCUUUUAUCUCAUUACUUUGAGAGCCAUCACCAGCGACUA |
| | Hammerhead | UGUCGUAUGGGUAAAGCGCUUAUUUAUCGGAGAGAAAUCCGAUAAAU |
| | ribozyme | AAGAAGCAUCAAAGCCAGUACUGAUGAGUCCGUGAGGAAACGACGAG |
| | (Lior Nissim, | UAAGCUCGUCUACUGGCGCUUUUAUCUCAU |
| | Timothy Lu) | |
| | guide scaffold | |
| | scar | |
| 2214 | =+A27, | UACUGGCGCCUUUAUCUCAUUACUUUAGAGAGCCAUCACCAGCGACU |
| | stacked onto | AUGUCGUAUGGGUAAAGCGCUUACGGACUUCGGUCCGUAAGAAGCAU |
| | 64 | CAG |
| 2215 | 5′Hammerhead | CGACUACUGAUGAGUCCGUGAGGACGAAACGAGUAAGCUCGUCUAGU |
| | ribozyme | CGUACUGGCGCUUUUAUCUCAUUACUUUGAGAGCCAUCACCAGCGAC |
| | (Li or Nissim, | UAUGUCGUAUGGGUAAAGCGCUUAUUUAUCGGAGAGAAAUCCGAUAA |
| | Timothy Lu) | AUAAGAAGCAUCAAAG |
| | smaller scar | |
| 2216 | phage rep | GCUGGCGCCUUUAUCUGAUUACUUUGAGAGCCAUCACCAGCGACUAU |
| | loop, C18G, | GUCGUAUGGGUAAAGCGCAGGUGGGACGACCUCUCGGUCGUCCUAUC |
| | trip mut | UGCGCAUCAAAG |
| | (U10C), -1 | |
| | A2G, HDV | |
| | AA(98:99)C | |
| 2217 | -27, stacked | UACUGGCGCCUUUAUCUCAUUACUUUAGAGCCAUCACCAGCGACUAU |
| | onto 64 | GUCGUAUGGGUAAAGCGCUUACGGACUUCGGUCCGUAAGAAGCAUCA |
| | | AAG |
| 2218 | 3′ Hatchet | UACUGGCGCUUUUAUCUCAUUACUUUGAGAGCCAUCACCAGCGACUA |
| | | UGUCGUAUGGGUAAAGCGCUUAUUUAUCGGAGAGAAAUCCGAUAAAU |
| | | AAGAAGCAUCAAAGCAUUCCUCAGAAAAUGACAAACCUGUGGGGCGU |
| | | AAGUAGAUCUUCGGAUCUAUGAUCGUGCAGACGUUAAAAUCAGGU |
| 2219 | 3′ | UACUGGCGCUUUUAUCUCAUUACUUUGAGAGCCAUCACCAGCGACUA |
| | Hammerhead | UGUCGUAUGGGUAAAGCGCUUAUUUAUCGGAGAGAAAUCCGAUAAAU |
| | ribozyme | AAGAAGCAUCAAAGCGACUACUGAUGAGUCCGUGAGGACGAAACGAG |
| | (Lior Nissim, | UAAGCUCGUCUAGUCGCGUGUAGCGAAGCA |
| | Timothy Lu) | |
| 2220 | 5′ Hatchet | CAUUCCUCAGAAAAUGACAAACCUGUGGGGCGUAAGUAGAUCUUCGG |
| | | AUCUAUGAUCGUGCAGACGUUAAAAUCAGGUUACUGGCGCUUUUAUC |
| | | UCAUUACUUUGAGAGCCAUCACCAGCGACUAUGUCGUAUGGGUAAAG |
| | | CGCUUAUUUAUCGGAGAGAAAUCCGAUAAAUAAGAAGCAUCAAAG |
| 2221 | 5′ HDV | UUUUGGCCGGCAUGGUCCCAGCCUCCUCGCUGGCGCCGGCUGGGCAA |
| | ribozyme | CAUGCUUCGGCAUGGCGAAUGGGACCCCGGGUACUGGCGCUUUUAUC |
| | (Lior Nissim, | UCAUUACUUUGAGAGCCAUCACCAGCGACUAUGUCGUAUGGGUAAAG |
| | Timothy Lu) | CGCUUAUUUAUCGGAGAGAAAUCCGAUAAAUAAGAAGCAUCAAAG |
| 2222 | 5′ | CGACUACUGAUGAGUCCGUGAGGACGAAACGAGUAAGCUCGUCUAGU |
| | Hammerhead | CGCGUGUAGCGAAGCAUACUGGCGCUUUUAUCUCAUUACUUUGAGAG |
| | ribozyme | CCAUCACCAGCGACUAUGUCGUAUGGGUAAAGCGCUUAUUUAUCGGA |
| | (Lior Nissim, | GAGAAAUCCGAUAAAUAAGAAGCAUCAAAG |
| | Timothy Lu) | |
| 2223 | 3′ HH15 | UACUGGCGCUUUUAUCUCAUUACUUUGAGAGCCAUCACCAGCGACUA |
| | Minimal | UGUCGUAUGGGUAAAGCGCUUAUUUAUCGGAGAGAAAUCCGAUAAAU |
| | Hammerhead | AAGAAGCAUCAAAGGGGAGCCCCGCUGAUGAGGUCGGGGAGACCGAA |
| | ribozyme | AGGGACUUCGGUCCCUACGGGGCUCCC |
| 2224 | 5′ RBMX | CCACCCCCACCACCACCCCCACCCCCACCACCACCCUACUGGCGCUU |
| | recruiting | UUAUCUCAUUACUUUGAGAGCCAUCACCAGCGACUAUGUCGUAUGGG |
| | motif | UAAAGCGCUUAUUUAUCGGAGAGAAAUCCGAUAAAUAAGAAGCAUCA |
| | | AAG |
| 2225 | 3′ | UACUGGCGCUUUUAUCUCAUUACUUUGAGAGCCAUCACCAGCGACUA |
| | Hammerhead | UGUCGUAUGGGUAAAGCGCUUAUUUAUCGGAGAGAAAUCCGAUAAAU |
| | ribozyme | AAGAAGCAUCAAAGCGACUACUGAUGAGUCCGUGAGGACGAAACGAG |
| | (Lior Nissim, | UAAGCUCGUCUAGUCG |
| | Timothy Lu) | |
| | smaller scar | |
| 2226 | 3′ env25 pistol | UACUGGCGCUUUUAUCUCAUUACUUUGAGAGCCAUCACCAGCGACUA |
| | ribozyme | UGUCGUAUGGGUAAAGCGCUUAUUUAUCGGAGAGAAAUCCGAUAAAU |
| | (with an added | AAGAAGCAUCAAAGCGUGGUUAGGGCCACGUUAAAUAGUUGCUUAAG |
| | CUUCGG | CCCUAAGCGUUGAUCUUCGGAUCAGGUGCAA |
| | loop) | |
| 2227 | 3′ Env-9 | UACUGGCGCUUUUAUCUCAUUACUUUGAGAGCCAUCACCAGCGACUA |
| | Twister | UGUCGUAUGGGUAAAGCGCUUAUUUAUCGGAGAGAAAUCCGAUAAAU |
| | | AAGAAGCAUCAAAGGGCAAUAAAGCGGUUACAAGCCCGCAAAAAUAG |
| | | CAGAGUAAUGUCGCGAUAGCGCGGCAUUAAUGCAGCUUUAUUG |
| 2228 | =+AUUAUC | UACUGGCGCUUUUAUCUCAUUACUAUUAUCUCAUUACUUUGAGAGCC |
| | UCAUUACU | AUCACCAGCGACUAUGUCGUAUGGGUAAAGCGCUUAUUUAUCGGAGA |
| | 25 | GAAAUCCGAUAAAUAAGAAGCAUCAAAG |
| 2229 | 5′ Env-9 | GGCAAUAAAGCGGUUACAAGCCCGCAAAAAUAGCAGAGUAAUGUCGC |
| | Twister | GAUAGCGCGGCAUUAAUGCAGCUUUAUUGUACUGGCGCUUUUAUCUC |
| | | AUUACUUUGAGAGCCAUCACCAGCGACUAUGUCGUAUGGGUAAAGCG |
| | | CUUAUUUAUCGGAGAGAAAUCCGAUAAAUAAGAAGCAUCAAAG |
| 2230 | 3′ Twisted | UACUGGCGCUUUUAUCUCAUUACUUUGAGAGCCAUCACCAGCGACUA |
| | Sister 1 | UGUCGUAUGGGUAAAGCGCUUAUUUAUCGGAGAGAAAUCCGAUAAAU |
| | | AAGAAGCAUCAAAGACCCGCAAGGCCGACGGCAUCCGCCGCCGCUGG |
| | | UGCAAGUCCAGCCGCCCCUUCGGGGGCGGGCGCUCAUGGGUAAC |
| 2231 | no stem | UACUGGCGCUUUUAUCUCAUUACUUUGAGAGCCAUCACCAGCGACUA |
| | | UGUCGUAUGGGUAAAG |
| 2232 | 5′ HH15 | GGGAGCCCCGCUGAUGAGGUCGGGGAGACCGAAAGGGACUUCGGUCC |
| | Minimal | CUACGGGGCUCCCUACUGGCGCUUUUAUCUCAUUACUUUGAGAGCCA |
| | Hammerhead | UCACCAGCGACUAUGUCGUAUGGGUAAAGCGCUUAUUUAUCGGAGAG |
| | ribozyme | AAAUCCGAUAAAUAAGAAGCAUCAAAG |
| 2233 | 5′ | CCAGUACUGAUGAGUCCGUGAGGACGAAACGAGUAAGCUCGUCUACU |
| | Hammerhead | GGCGCUUUUAUCUCAUUACUGGCGCUUUUAUCUCAUUACUUUGAGAG |
| | ribozyme | CCAUCACCAGCGACUAUGUCGUAUGGGUAAAGCGCUUAUUUAUCGGA |
| | (Li or Nissim, | GAGAAAUCCGAUAAAUAAGAAGCAUCAAAG |
| | Timothy Lu) | |
| | guide scaffold | |
| | scar | |
| 2234 | 5′ Twisted | ACCCGCAAGGCCGACGGCAUCCGCCGCCGCUGGUGCAAGUCCAGCCG |
| | Sister 1 | CCCCUUCGGGGGCGGGCGCUCAUGGGUAACUACUGGCGCUUUUAUCU |
| | | CAUUACUUUGAGAGCCAUCACCAGCGACUAUGUCGUAUGGGUAAAGC |
| | | GCUUAUUUAUCGGAGAGAAAUCCGAUAAAUAAGAAGCAUCAAAG |
| 2235 | 5′ sTRSV WT | CCUGUCACCGGAUGUGCUUUCCGGUCUGAUGAGUCCGUGAGGACGAA |
| | viral | ACAGGUACUGGCGCUUUUAUCUCAUUACUUUGAGAGCCAUCACCAGC |
| | Hammerhead | GACUAUGUCGUAUGGGUAAAGCGCUUAUUUAUCGGAGAGAAAUCCGA |
| | ribozyme | UAAAUAAGAAGCAUCAAAG |
| 2236 | 148: =+G55, | GUACUGGCGCCUUUAUCUCAUUACUUUGAGAGCCAUCACCAGCGACU |
| | stacked onto | AUGUCGUAGUGGGUAAAGCGCUUACGGACUUCGGUCCGUAAGAAGCA |
| | 64 | UCAAAG |
| 2237 | 158: | GUACUGGCGCUUUUAUCUGAUUACUUUGAGAGCCAUCACCAGCGACU |
| | 103+148(+G55) | AUGUCGUAGUGGGUAAAGCUCCCUCUUCGGAGGGAGCAUCAAAG |
| | -99, G65U | |
| 2238 | 174: Uvsx | ACUGGCGCUUUUAUCUGAUUACUUUGAGAGCCAUCACCAGCGACUAU |
| | Extended stem | GUCGUAGUGGGUAAAGCUCCCUCUUCGGAGGGAGCAUCAAAG |
| | with [A99] | |
| | G65U), | |
| | C18G, \hat{ }G55, | |
| | [GU-1] | |
| 2239 | 175: extended | ACUGGCGCCUUUAUCUCAUUACUUUGAGAGCCAUCACCAGCGACUAU |
| | stem | GUCGUAUGGGUAAAGCGCUUACGGACUUCGGUCCGUAAGAAGCAUCA |
| | truncation, | AAG |
| | U10C, [GU-1] | |
| 2240 | 176: 174 with | GCUGGCGCUUUUAUCUGAUUACUUUGAGAGCCAUCACCAGCGACUAU |
| | A1G | GUCGUAGUGGGUAAAGCUCCCUCUUCGGAGGGAGCAUCAAAG |
| | substitution | |
| | for T7 | |
| | transcription | |
| 2241 | 177: 174 with | ACUGGCGCUUUUAUCUGAUUACUUUGAGAGCCAUCACCAGCGACUAU |
| | bubble (+G55) | GUCGUAUGGGUAAAGCUCCCUCUUCGGAGGGAGCAUCAAAG |
| | removed | |
| 2242 | 181: stem 42 | ACUGGCGCCUUUAUCUGAUUACUUUGAGAGCCAUCACCAGCGACUAU |
| | (truncated | GUCGUAUGGGUAAAGCGCUUACGGACUUCGGUCCGUAAGAAGCAUCA |
| | stem loop); | AAG |
| | U10C, C18G, | |
| | [GU-1] | |
| | (95+[GU-1]) | |
| 2243 | 182: stem 42 | ACUGGCGCUUUUAUCUGAUUACUUUGAGAGCCAUCACCAGCGACUAU |
| | (truncated | GUCGUAUGGGUAAAGCGCUUACGGACUUCGGUCCGUAAGAAGCAUCA |
| | stem loop); | AAG |
| | C18G, [GU-1] | |
| 2244 | 183: stem 42 | ACUGGCGCUUUUAUCUGAUUACUUUGAGAGCCAUCACCAGCGACUAU |
| | (truncated | GUCGUAGUGGGUAAAGCGCUUACGGACUUCGGUCCGUAAGAAGCAUC |
| | stem loop); | AAAG |
| | C18G, \hat{ }G55, | |
| | [GU-1] | |
| 2245 | 184: stem 48 | ACUGGCGCUUUUAUCUGAUUACUUUGAGAGCCAUCACCAGCGACUAU |
| | (uvsx, -99 | GUCGUAUUGGGUAAAGCUCCCUCUUCGGAGGGAGCAUCAAAG |
| | g65t); | |
| | C18G, \hat{ }T55, | |
| | [GU-1] | |
| 2246 | 185: stem 42 | ACUGGCGCUUUUAUCUGAUUACUUUGAGAGCCAUCACCAGCGACUAU |
| | (truncated | GUCGUAUUGGGUAAAGCGCUUACGGACUUCGGUCCGUAAGAAGCAUC |
| | stem loop); | AAAG |
| | C18G, \hat{ }U55, | |
| | [GU-1] | |
| 2247 | 186: stem 42 | ACUGGCGCCUUUAUCAUCAUUACUUUGAGAGCCAUCACCAGCGACUA |
| | (truncated | UGUCGUAUGGGUAAAGCGCUUACGGACUUCGGUCCGUAAGAAGCAUC |
| | stem loop); | AAAG |
| | U10C, \hat{ }A17, | |
| | [GU-1] | |
| 2248 | 187: stem 46 | ACUGGCGCUUUUAUCUGAUUACUUUGAGAGCCAUCACCAGCGACUAU |
| | (uvsx); | GUCGUAGUGGGUAAAGCGCCCUCUUCGGAGGGAAGCAUCAAAG |
| | C18G, \hat{ }G55, | |
| | [GU-1] | |
| 2249 | 188: stem 50 | ACUGGCGCUUUUAUCUGAUUACUUUGAGAGCCAUCACCAGCGACUAU |
| | (m52 U15C, | GUCGUAGUGGGUAAAGCUCACAUGAGGAUCACCCAUGUGAGCAUCAA |
| | -99, g65t); | AG |
| | C18G, \hat{ }G55, | |
| | [GU-1] | |
| 2250 | 189: 174 + | |
| | G8A; U15C; | ACUGGCACUUUUACCUGAUUACUUUGAGAGCCAACACCAGCGACUAU |
| | U35A | GUCGUAGUGGGUAAAGCUCCCUCUUCGGAGGGAGCAUCAAAG |
| 2251 | 190: 174 + | ACUGGCACUUUUAUCUGAUUACUUUGAGAGCCAUCACCAGCGACUAU |
| | G8A | GUCGUAGUGGGUAAAGCUCCCUCUUCGGAGGGAGCAUCAAAG |
| 2252 | 191: 174 + | ACUGGCCCUUUUAUCUGAUUACUUUGAGAGCCAUCACCAGCGACUAU |
| | G8C | GUCGUAGUGGGUAAAGCUCCCUCUUCGGAGGGAGCAUCAAAG |
| 2253 | 192: 174 + | ACUGGCGCUUUUACCUGAUUACUUUGAGAGCCAUCACCAGCGACUAU |
| | U15C | GUCGUAGUGGGUAAAGCUCCCUCUUCGGAGGGAGCAUCAAAG |
| 2254 | 193, 174 + | ACUGGCGCUUUUAUCUGAUUACUUUGAGAGCCAACACCAGCGACUAU |
| | U35A | GUCGUAGUGGGUAAAGCUCCCUCUUCGGAGGGAGCAUCAAAG |
| 2255 | 195: 175 + | |
| | C18G + | ACUGGCACCUUUACCUGAUUACUUUGAGAGCCAACACCAGCGACUAU |
| | G8A; U15C; | GUCGUAUGGGUAAAGCGCUUACGGACUUCGGUCCGUAAGAAGCAUCA |
| | U35A | AAG |
| 2256 | 196: 175 + | ACUGGCACCUUUAUCUGAUUACUUUGAGAGCCAUCACCAGCGACUAU |
| | C18G + G8A | GUCGUAUGGGUAAAGCGCUUACGGACUUCGGUCCGUAAGAAGCAUCA |
| | | AAG |
| 2257 | 197: 175 + | ACUGGCCCCUUUAUCUGAUUACUUUGAGAGCCAUCACCAGCGACUAU |
| | C18G + G8C | GUCGUAUGGGUAAAGCGCUUACGGACUUCGGUCCGUAAGAAGCAUCA |
| | | AAG |
| 2258 | 198: 175 + | ACUGGCGCCUUUAUCUGAUUACUUUGAGAGCCAACACCAGCGACUAU |
| | C18G + U35A | GUCGUAUGGGUAAAGCGCUUACGGACUUCGGUCCGUAAGAAGCAUCA |
| | | AAG |
| 2259 | 199: 174 + | GCUGGCGCUUUUAUCUGAUUACUUUGAGAGCCAUCACCAGCGACUAU |
| | A2G (test G | GUCGUAGUGGGUAAAGCUCCCUCUUCGGAGGGAGCAUCAAAG |
| | transcription | |
| | at start; | |
| | ccGCT . . . ) | |
| 2260 | 200: 174 + | GACUGGCGCUUUUAUCUGAUUACUUUGAGAGCCAUCACCAGCGACUA |
| | \hat{ }G1 | UGUCGUAGUGGGUAAAGCUCCCUCUUCGGAGGGAGCAUCAAAG |
| | (ccGACU . . . ) | |
| 2261 | 201: 174 + | ACUGGCGCCUUUAUCUGAUUACUUUGGAGAGCCAUCACCAGCGACUA |
| | U10C; AG28 | UGUCGUAGUGGGUAAAGCUCCCUCUUCGGAGGGAGCAUCAAAG |
| 2262 | 202: 174 + | ACUGGCGCAUUUAUCUGAUUACUUUGUGAGCCAUCACCAGCGACUAU |
| | U10A; A28U | GUCGUAGUGGGUAAAGCUCCCUCUUCGGAGGGAGCAUCAAAG |
| 2263 | 203: 174 + | ACUGGCGCCUUUAUCUGAUUACUUUGAGAGCCAUCACCAGCGACUAU |
| | U10C | GUCGUAGUGGGUAAAGCUCCCUCUUCGGAGGGAGCAUCAAAG |
| 2264 | 204: 174 + | ACUGGCGCUUUUAUCUGAUUACUUUGGAGAGCCAUCACCAGCGACUA |
| | \hat{ }G28 | UGUCGUAGUGGGUAAAGCUCCCUCUUCGGAGGGAGCAUCAAAG |
| 2265 | 205: 174 + | ACUGGCGCAUUUAUCUGAUUACUUUGAGAGCCAUCACCAGCGACUAU |
| | U10A | GUCGUAGUGGGUAAAGCUCCCUCUUCGGAGGGAGCAUCAAAG |
| 2266 | 206, 174 + | ACUGGCGCUUUUAUCUGAUUACUUUGUGAGCCAUCACCAGCGACUAU |
| | A28U | GUCGUAGUGGGUAAAGCUCCCUCUUCGGAGGGAGCAUCAAAG |
| 2267 | 207: 174 + | ACUGGCGCUUUUAUUCUGAUUACUUUGAGAGCCAUCACCAGCGACUA |
| | \hat{ }U15 | UGUCGUAGUGGGUAAAGCUCCCUCUUCGGAGGGAGCAUCAAAG |
| 2268 | 208: 174 + | ACGGCGCUUUUAUCUGAUUACUUUGAGAGCCAUCACCAGCGACUAUG |
| | [U4] | UCGUAGUGGGUAAAGCUCCCUCUUCGGAGGGAGCAUCAAAG |
| 2269 | 209: 174 + | ACUGGCGCUUUUAUAUGAUUACUUUGAGAGCCAUCACCAGCGACUAU |
| | C16A | GUCGUAGUGGGUAAAGCUCCCUCUUCGGAGGGAGCAUCAAAG |
| 2270 | 210: 174 + | ACUGGCGCUUUUAUCUUGAUUACUUUGAGAGCCAUCACCAGCGACUA |
| | \hat{ }U17 | UGUCGUAGUGGGUAAAGCUCCCUCUUCGGAGGGAGCAUCAAAG |
| 2271 | 211: 174 + | ACUGGCGCUUUUAUCUGAUUACUUUGAGAGCCAGCACCAGCGACUAU |
| | U35G | GUCGUAGUGGGUAAAGCUCCCUCUUCGGAGGGAGCAUCAAAG |
| | (compare with | |
| | 174 + U35A | |
| | above) | |
| 2272 | 212: 174 + | ACUGGCGCUGUUAUCUGAUUACUUCGAGAGCCAUCACCAGCGACUAU |
| | U11G, | GUCGUAGUGGGUAAAGCUCCCUCUUCGGAGGGAGCAUCGAAG |
| | A105G | |
| | (A86G), | |
| | U26C | |
| 2273 | 213: 174 + | ACUGGCGCUCUUAUCUGAUUACUUCGAGAGCCAUCACCAGCGACUAU |
| | U11C, | GUCGUAGUGGGUAAAGCUCCCUCUUCGGAGGGAGCAUCGAAG |
| | A105G | |
| | (A86G), | |
| | U26C | |
| 2274 | 214: | ACUGGCGCUUGUAUCUGAUUACUCUGAGAGCCAUCACCAGCGACUAU |
| | 174 + U12G; | GUCGUAGUGGGUAAAGCUCCCUCUUCGGAGGGAGCAUCAGAG |
| | A106G | |
| | (A87G), | |
| | U25C | |
| 2275 | 215: 174 + U12C; | ACUGGCGCUUCUAUCUGAUUACUCUGAGAGCCAUCACCAGCGACUAU |
| | A106G | GUCGUAGUGGGUAAAGCUCCCUCUUCGGAGGGAGCAUCAGAG |
| | (A87G), | |
| | U25C | |
| 2276 | 216: | ACUGGCGCUUUGAUCUGAUUACCUUGAGAGCCAUCACCAGCGACUAU |
| | 174_tx_11.G, | GUCGUAGUGGGUAAAGCUCCCUCUUCGGAGGGAGCAUCAAGG |
| | 87.G, 22.0 | |
| 2277 | 217: | ACUGGCGCUUUCAUCUGAUUACCUUGAGAGCCAUCACCAGCGACUAU |
| | 174_tx_11.C, | GUCGUAGUGGGUAAAGCUCCCUCUUCGGAGGGAGCAUCAAGG |
| | 87.G, 22.0 | |
| 2278 | 218: 174 + | ACUGGCGCUGUUAUCUGAUUACUUUGAGAGCCAUCACCAGCGACUAU |
| | U11G | GUCGUAGUGGGUAAAGCUCCCUCUUCGGAGGGAGCAUCAAAG |
| 2279 | 219: 174 + | ACUGGCGCUUUUAUCUGAUUACUUUGAGAGCCAUCACCAGCGACUAU |
| | A105G | GUCGUAGUGGGUAAAGCUCCCUCUUCGGAGGGAGCAUCGAAG |
| | (A86G) | |
| 2280 | 220: 174 + | ACUGGCGCUUUUAUCUGAUUACUUCGAGAGCCAUCACCAGCGACUAU |
| | U26C | GUCGUAGUGGGUAAAGCUCCCUCUUCGGAGGGAGCAUCAAAG |

[0150] In some embodiments, the gNA variant comprises a tracrRNA stem loop comprising the sequence -UUU-N4-25-UUU- (SEQ ID NO: 21). For example, the gNA variant comprises a scaffold stem loop or a replacement thereof, flanked by two triplet U motifs that contribute to the triplex region. In some embodiments, the scaffold stem loop or replacement thereof comprises at least 4 nucleotides, at least 5 nucleotides, at least 6 nucleotides, at least 7 nucleotides, at least 7 nucleotides, at least 8 nucleotides, at least 9 nucleotides, at least 10 nucleotides, at least 11 nucleotides, at least 12 nucleotides, at least 13 nucleotides, at least 14 nucleotides, at least 15 nucleotides, at least 16 nucleotides, at least 17 nucleotides, at least 18 nucleotides, at least 19 nucleotides, at least 20 nucleotides, at least 21 nucleotides, at least 22 nucleotides, at least 23 nucleotides, at least 24 nucleotides, or at least 25 nucleotides.

[0151] In some embodiments, the gNA variant comprises a crRNA sequence with -AAAG- in a location 5′ to the spacer region. In some embodiments, the -AAAG- sequence is immediately 5′ to the spacer region.

[0152] In some embodiments, the at least one nucleotide modification to a reference gNA to produce a gNA variant comprises at least one nucleotide deletion in the CasX variant gNA relative to the reference gRNA. In some embodiments, a gNA variant comprises a deletion of 1, 2, 3, 4, 5, 6, 7, 8, 9, 10, 11, 12, 13, 14, 15, 16, 17, 18, 19 or 20 consecutive or non-consecutive nucleotides relative to a reference gNA. In some embodiments, the at least one deletion comprises a deletion of 1, 2, 3, 4, 5, 6, 7, 8, 9, 10, 11, 12, 13, 14, 15, 16, 17, 18, 19 or 20 or more consecutive nucleotides relative to a reference gNA. In some embodiments, the gNA variant comprises 2, 3, 4, 5, 6, 7, 8, 9, 10, 11, 12, 13, 14, 15, 16, 17, 18, 19 or 20 or more nucleotide deletions relative to the reference gNA, and the deletions are not in consecutive nucleotides. In those embodiments where there are two or more non-consecutive deletions in the gNA variant relative to the reference gRNA, any length of deletions, and any combination of lengths of deletions, as described herein, are contemplated as within the scope of the disclosure. For example, in some embodiments, a gNA variant may comprise a first deletion of one nucleotide, and a second deletion of two nucleotides and the two deletions are not consecutive. In some embodiments, a gNA variant comprises at least two deletions in different regions of the reference gRNA. In some embodiments, a gNA variant comprises at least two deletions in the same region of the reference gRNA. For example, the regions may be the extended stem loop, scaffold stem loop, scaffold stem bubble, triplex loop, pseudoknot, triplex, or a 5′ end of the gNA variant. The deletion of any nucleotide in a reference gRNA is contemplated as within the scope of the disclosure.

[0153] In some embodiments, the at least one nucleotide modification of a reference gRNA to generate a gNA variant comprises at least one nucleotide insertion. In some embodiments, a gNA variant comprises an insertion of 1, 2, 3, 4, 5, 6, 7, 8, 9 or 10 consecutive or non-consecutive nucleotides relative to a reference gRNA. In some embodiments, the at least one nucleotide insertion comprises an insertion of 1, 2, 3, 4, 5, 6, 7, 8, 9, 10, 11, 12, 13, 14, 15, 16, 17, 18, 19 or 20 or more consecutive nucleotides relative to a reference gRNA. In some embodiments, the gNA variant comprises 2 or more insertions relative to the reference gRNA, and the insertions are not consecutive. In those embodiments where there are two or more non-consecutive insertions in the gNA variant relative to the reference gRNA, any length of insertions, and any combination of lengths of insertions, as described herein, are contemplated as within the scope of the disclosure. For example, in some embodiments, a gNA variant may comprise a first insertion of one nucleotide, and a second insertion of two nucleotides and the two insertions are not consecutive. In some embodiments, a gNA variant comprises at least two insertions in different regions of the reference gRNA. In some embodiments, a gNA variant comprises at least two insertions in the same region of the reference gRNA. For example, the regions may be the extended stem loop, scaffold stem loop, scaffold stem bubble, triplex loop, pseudoknot, triplex, or a 5′ end of the gNA variant. Any insertion of A, G, C, U (or T, in the corresponding DNA) or combinations thereof at any location in the reference gRNA is contemplated as within the scope of the disclosure.

[0154] In some embodiments, the at least one nucleotide modification of a reference gRNA to generate a gNA variant comprises at least one nucleic acid substitution. In some embodiments, a gNA variant comprises 1, 2, 3, 4, 5, 6, 7, 8, 9, 10, 11, 12, 13, 14, 15, 16, 17, 18, 19 or 20 or more consecutive or non-consecutive substituted nucleotides relative to a reference gRNA. In some embodiments, a gNA variant comprises 1-4 nucleotide substitutions relative to a reference gRNA. In some embodiments, the at least one substitution comprises a substitution of 1, 2, 3, 4, 5, 6, 7, 8, 9, 10, 11, 12, 13, 14, 15, 16, 17, 18, 19 or 20 or more consecutive nucleotides relative to a reference gRNA. In some embodiments, the gNA variant comprises 2 or more substitutions relative to the reference gRNA, and the substitutions are not consecutive. In those embodiments where there are two or more non-consecutive substitutions in the gNA variant relative to the reference gRNA, any length of substituted nucleotides, and any combination of lengths of substituted nucleotides, as described herein, are contemplated as within the scope of the disclosure. For example, in some embodiments, a gNA variant may comprise a first substitution of one nucleotide, and a second substitution of two nucleotides and the two substitutions are not consecutive. In some embodiments, a gNA variant comprises at least two substitutions in different regions of the reference gRNA. In some embodiments, a gNA variant comprises at least two substitutions in the same region of the reference gRNA. For example, the regions may be the triplex, the extended stem loop, scaffold stem loop, scaffold stem bubble, triplex loop, pseudoknot, triplex, or a 5′ end of the gNA variant. Any substitution of A, G, C, U (or T, in the corresponding DNA) or combinations thereof at any location in the reference gRNA is contemplated as within the scope of the disclosure.

[0155] Any of the substitutions, insertions and deletions described herein can be combined to generate a gNA variant of the disclosure. For example, a gNA variant can comprise at least one substitution and at least one deletion relative to a reference gRNA, at least one substitution and at least one insertion relative to a reference gRNA, at least one insertion and at least one deletion relative to a reference gRNA, or at least one substitution, one insertion and one deletion relative to a reference gRNA.

[0156] In some embodiments, the gNA variant comprises a scaffold region at least 20% identical, at least 30% identical, at least 40% identical, at least 50% identical, at least 60% identical, at least 65% identical, at least 70% identical, at least 75% identical, at least 80% identical, at least 85% identical, at least 90% identical, at least 91% identical, at least 92% identical, at least 93% identical, at least 94% identical, at least 95% identical, at least 96% identical, at least 97% identical, at least 98% identical, or at least 99% identical to any one of SEQ ID NOS: 4-16. In some embodiments, the gNA variant comprises a scaffold region at least 60% homologous (or identical) to any one of SEQ ID NOS: 4-16.

[0157] In some embodiments, the gNA variant comprises a tracr stem loop at least 60% identical, at least 65% identical, at least 70% identical, at least 75% identical, at least 80% identical, at least 85% identical, at least 90% identical, at least 91% identical, at least 92% identical, at least 93% identical, at least 94% identical, at least 95% identical, at least 96% identical, at least 97% identical, at least 98% identical, or at least 99% identical to SEQ ID NO: 14. In some embodiments, the gNA variant comprises a tracr stem loop at least 60% homologous (or identical) to SEQ ID NO: 14.

[0158] In some embodiments, the gNA variant comprises an extended stem loop at least 60% identical, at least 65% identical, at least 70% identical, at least 75% identical, at least 80% identical, at least 85% identical, at least 90% identical, at least 91% identical, at least 92% identical, at least 93% identical, at least 94% identical, at least 95% identical, at least 96% identical, at least 97% identical, at least 98% identical, or at least 99% identical to SEQ ID NO: 15. In some embodiments, the gNA variant comprises an extended stem loop at least 60% homologous (or identical) to SEQ ID NO: 15.

[0159] In some embodiments, the gNA variant comprises an exogenous extended stem loop, with such differences from a reference gNA described as follows. In some embodiments, an exogenous extended stem loop has little or no identity to the reference stem loop regions disclosed herein (e.g., SEQ ID NO: 15). In some embodiments, an exogenous stem loop is at least 10 bp, at least 20 bp, at least 30 bp, at least 40 bp, at least 50 bp, at least 60 bp, at least 70 bp, at least 80 bp, at least 90 bp, at least 100 bp, at least 200 bp, at least 300 bp, at least 400 bp, at least 500 bp, at least 600 bp, at least 700 bp, at least 800 bp, at least 900 bp, at least 1,000 bp, at least 2,000 bp, at least 3,000 bp, at least 4,000 bp, at least 5,000 bp, at least 6,000 bp, at least 7,000 bp, at least 8,000 bp, at least 9,000 bp, at least 10,000 bp, at least 12,000 bp, at least 15,000 bp or at least 20,000 bp. In some embodiments, the gNA variant comprises an extended stem loop region comprising at least 10, at least 100, at least 500, at least 1000, or at least 10,000 nucleotides. In some embodiments, the heterologous stem loop increases the stability of the gNA. In some embodiments, the heterologous RNA stem loop is capable of binding a protein, an RNA structure, a DNA sequence, or a small molecule. In some embodiments, an exogenous stem loop region comprises an RNA stem loop or hairpin, for example a thermostable RNA such as MS2 (ACAUGAGGAUUACCCAUGU; SEQ ID NO: 22), Q3 (UGCAUGUCUAAGACAGCA; SEQ ID NO: 23), U1 hairpin II (AAUCCAUUGCACUCCGGAUU; SEQ ID NO: 24), Uvsx (CCUCUUCGGAGG; SEQ ID NO: 25), PP7 (AGGAGUUUCUAUGGAAACCCU; SEQ ID NO: 26), Phage replication loop (AGGUGGGACGACCUCUCGGUCGUCCUAUCU; SEQ ID NO: 27), Kissing loop_a (UGCUCGCUCCGUUCGAGCA; SEQ ID NO: 28), Kissing loop_b1 (UGCUCGACGCGUCCUCGAGCA; SEQ ID NO: 29), Kissing loop_b2 (UGCUCGUUUGCGGCUACGAGCA; SEQ ID NO: 30), G quadriplex M3q (AGGGAGGGAGGGAGAGG; SEQ ID NO: 31), G quadriplex telomere basket (GGUUAGGGUUAGGGUUAGG; SEQ ID NO: 32), Sarcin-ricin loop (CUGCUCAGUACGAGAGGAACCGCAG; SEQ ID NO: 33) or Pseudoknots (UACACUGGGAUCGCUGAAUUAGAGAUCGGCGUCCUUUCAUUCUAUAUACUUUGGAG UUUUAAAAUGUCUCUAAGUACA; SEQ ID NO: 34). In some embodiments, an exogenous stem loop comprises an RNA scaffold. As used herein, an “RNA scaffold” refers to a multi-dimensional RNA structure capable of interacting with and organizing or localizing one or more proteins. In some embodiments, the RNA scaffold is synthetic or non-naturally occurring. In some embodiments, an exogenous stem loop comprises a long non-coding RNA (lncRNA). As used herein, a lncRNA refers to a non-coding RNA that is longer than approximately 200 bp in length. In some embodiments, the 5′ and 3′ ends of the exogenous stem loop are base paired, i.e., interact to form a region of duplex RNA. In some embodiments, the 5′ and 3′ ends of the exogenous stem loop are base paired, and one or more regions between the 5′ and 3′ ends of the exogenous stem loop are not base paired. In some embodiments, the at least one nucleotide modification comprises: (a) substitution of 1 to 15 consecutive or non-consecutive nucleotides in the gNA variant in one or more regions; (b) a deletion of 1 to 10 consecutive or non-consecutive nucleotides in the gNA variant in one or more regions; (c) an insertion of 1 to 10 consecutive or non-consecutive nucleotides in the gNA variant in one or more regions; (d) a substitution of the scaffold stem loop or the extended stem loop with an RNA stem loop sequence from a heterologous RNA source with proximal 5′ and 3′ ends; or any combination of (a)-(d).

[0160] In some embodiments, the gNA variant comprises a scaffold stem loop having at least 60% identity to SEQ ID NO: 14. In some embodiments, the gNA variant comprises a scaffold stem loop having at least 60% identity, at least 70% identity, at least 80% identity, at least 90% identity, at least 95% identity, at least 98% identity or at least 99% identity to SEQ ID NO: 14. In some embodiments, the gNA variant comprises a scaffold stem loop comprising SEQ ID NO: 14.

[0161] In some embodiments, the gNA variant comprises a scaffold stem loop sequence of CCAGCGACUAUGUCGUAGUGG (SEQ ID NO: 20). In some embodiments, the gNA variant comprises a scaffold stem loop sequence of CCAGCGACUAUGUCGUAGUGG (SEQ ID NO: 20) with at least 1, 2, 3, 4, or 5 mismatches thereto.

[0162] In some embodiments, the gNA variant comprises an extended stem loop region comprising less than 32 nucleotides, less than 31 nucleotides, less than 30 nucleotides, less than 29 nucleotides, less than 28 nucleotides, less than 27 nucleotides, less than 26 nucleotides, less than 25 nucleotides, less than 24 nucleotides, less than 23 nucleotides, less than 22 nucleotides, less than 21 nucleotides, or less than 20 nucleotides. In some embodiments, the gNA variant comprises an extended stem loop region comprising less than 32 nucleotides. In some embodiments, the gNA variant further comprises a thermostable stem loop.

[0163] In some embodiments, a sgRNA variant comprises a sequence of SEQ ID NO: 2104, SEQ ID NO: 2106, SEQ ID NO: 2163, SEQ ID NO: 2107, SEQ ID NO: 2164, SEQ ID NO: 2165, SEQ ID NO: 2166, SEQ ID NO: 2103, SEQ ID NO: 2167, SEQ ID NO: 2105, SEQ ID NO: 2108, SEQ ID NO: 2112, SEQ ID NO: 2160, SEQ ID NO: 2170, SEQ ID NO: 2114, SEQ ID NO: 2171, SEQ ID NO: 2112, SEQ ID NO: 2173, SEQ ID NO: 2102, SEQ ID NO: 2174, SEQ ID NO: 2175, SEQ ID NO: 2109, SEQ ID NO: 2176, SEQ ID NO: 2238, SEQ ID NO: 2239, SEQ ID NO: 2240, SEQ ID NO: 2241, SEQ ID NO: 2274, or SEQ ID NO: 2275.

[0164] In some embodiments, the gNA variant comprises the sequence of any one of SEQ ID NOS: 2236, 2237, 2238, 2241, 2244, 2248, 2249, or 2259-2280, or having at least about 80%, at least about 90%, at least about 95%, at least about 96%, at least about 97%, at least about 98%, at least about 99% identity thereto. In some embodiments, the gNA variant comprises one or more additional changes to a sequence of any one of SEQ ID NOs: 2201-2280. In some embodiments, the gNA variant comprises the sequence of any one of SEQ ID NOS: 2236, 2237, 2238, 2241, 2244, 2248, 2249, or 2259-2280.

[0165] In some embodiments, a sgRNA variant comprises one or more additional changes to a sequence of SEQ ID NO: 2104, SEQ ID NO: 2163, SEQ ID NO: 2107, SEQ ID NO: 2164, SEQ ID NO: 2165, SEQ ID NO: 2166, SEQ ID NO: 2103, SEQ ID NO: 2167, SEQ ID NO: 2105, SEQ ID NO: 2108, SEQ ID NO: 2112, SEQ ID NO: 2160, SEQ ID NO: 2170, SEQ ID NO: 2114, SEQ ID NO: 2171, SEQ ID NO: 2112, SEQ ID NO: 2173, SEQ ID NO: 2102, SEQ ID NO: 2174, SEQ ID NO: 2175, SEQ ID NO: 2109, SEQ ID NO: 2176, SEQ ID NO: 2238, SEQ ID NO: 2239, SEQ ID NO: 2240, SEQ ID NO: 2241, SEQ ID NO: 2274, or SEQ ID NO: 2275.

[0166] In some embodiments of the gNA variants of the disclosure, the gNA variant comprises at least one modification, wherein the at least one modification compared to the reference guide scaffold of SEQ ID NO: 5 is selected from one or more of: (a) a C18G substitution in the triplex loop; (b) a G55 insertion in the stem bubble; (c) a U1 deletion; (d) a modification of the extended stem loop wherein (i) a 6 nt loop and 13 loop-proximal base pairs are replaced by a Uvsx hairpin; and (ii) a deletion of A99 and a substitution of G65U that results in a loop-distal base that is fully base-paired. In such embodiments, the gNA variant comprises the sequence of any one of SEQ ID NOS: 2236, 2237, 2238, 2241, 2244, 2248, 2249, or 2259-2280.

[0167] In some embodiments, the scaffold of the gNA variant comprises the sequence of any one of SEQ ID NOS: 2201-2280 of Table 2B. In some embodiments, the scaffold of the gNA consists or consists essentially of the sequence of any one of SEQ ID NOS: 2201-2280. In some embodiments, the scaffold of the gNA variant sequence is at least about 60% identical, at least about 65% identical, at least about 70% identical, at least about 75% identical, at least about 80% identical, at least about 85% identical, at least about 90% identical, at least about 91% identical, at least about 92% identical, at least about 93% identical, at least about 94% identical, at least about 95% identical, at least about 96% identical, at least about 97% identical, at least about 98% identical or at least about 99% identical to any one of SEQ ID NOS: 2201 to 2280.

[0168] In the embodiments of the gNA variants, the gNA further comprises a spacer (or targeting sequence) region, described more fully, supra, which comprises at least 14 to about 35 nucleotides wherein the spacer is designed with a sequence that is complementary to a target DNA. In some embodiments, the gNA variant comprises a targeting sequence of at least 10 to 30 nucleotides complementary to a target DNA. In some embodiments, the targeting sequence has 14, 15, 16, 17, 18, 19, 20, 21, 22, 23, 24, 25, 26, 27, 28, 29, 30, 31, 32, 33, 34 or 35 nucleotides. In some embodiments, the gNA variant comprises a targeting sequence having 20 nucleotides. In some embodiments, the targeting sequence has 25 nucleotides. In some embodiments, the targeting sequence has 24 nucleotides. In some embodiments, the targeting sequence has 23 nucleotides. In some embodiments, the targeting sequence has 22 nucleotides. In some embodiments, the targeting sequence has 21 nucleotides. In some embodiments, the targeting sequence has 20 nucleotides. In some embodiments, the targeting sequence has 19 nucleotides. In some embodiments, the targeting sequence has 18 nucleotides. In some embodiments, the targeting sequence has 17 nucleotides. In some embodiments, the targeting sequence has 16 nucleotides. In some embodiments, the targeting sequence has 15 nucleotides. In some embodiments, the targeting sequence has 14 nucleotides. In some embodiments, the disclosure provides targeting sequences for inclusion in the gNA variants of the disclosure comprising a sequence that is at least 50% identical, at least 55% identical, at least 60% identical, at least 65% identical, at least 70% identical, at least 75% identical, at least 80% identical, at least 85% identical, at least 90% identical, at least 95% identical, or 100% identical to a sequence in Table 3. In some embodiments, the targeting sequence of the gNA variant comprises a sequence a sequence of Table 3 with a single nucleotide removed from the 3′ end of the sequence. In other embodiments, the targeting sequence of the gNA variant comprises a sequence a sequence of Table 3 with two nucleotides removed from the 3′ end of the sequence. In other embodiments, the targeting sequence of the gNA variant comprises a sequence a sequence of Table 3 with three nucleotides removed from the 3′ end of the sequence. In other embodiments, the targeting sequence of the gNA variant comprises a sequence a sequence of Table 3 with four nucleotides removed from the 3′ end of the sequence. In other embodiments, the targeting sequence of the gNA variant comprises a sequence a sequence of Table 3 with five nucleotides removed from the 3′ end of the sequence.

[0169] In some embodiments, the scaffold of the gNA variant is part of an RNP with a reference CasX protein comprising SEQ ID NO: 1, SEQ ID NO: 2, or SEQ ID NO: 3. In other embodiments, the scaffold of the gNA variant is part of an RNP with a CasX variant protein comprising any one of the sequences of Tables 4, 6, 7, 8, or 10, or a sequence having at least about 50%, at least about 60%, at least about 70%, at least about 80%, at least about 85%, at least about 90%, at least about 91%, at least about 92%, at least about 93%, at least about 94%, at least about 95%, at least about 96%, at least about 97%, at least about 98%, or at least about 99% identity thereto. In the foregoing embodiments, the gNA further comprises a spacer sequence.

[0170] In some embodiments, the scaffold of the gNA variant is a variant comprising one or more additional changes to a sequence of a reference gRNA that comprises SEQ ID NO: 4 or SEQ ID NO: 5. In those embodiments where the scaffold of the reference gRNA is derived from SEQ ID NO: 4 or SEQ ID NO: 5, the one or more improved or added characteristics of the gNA variant are improved compared to the same characteristic in SEQ ID NO: 4 or SEQ ID NO: 5.

[0171] h. Complex Formation with CasX Protein

[0172] In some embodiments, a gNA variant has an improved ability to form a complex with a CasX protein (such as a reference CasX or a CasX variant protein) when compared to a reference gRNA. In some embodiments, a gNA variant has an improved affinity for a CasX protein (such as a reference or variant protein) when compared to a reference gRNA, thereby improving its ability to form a ribonucleoprotein (RNP) complex with the CasX protein, as described in the Examples. Improving ribonucleoprotein complex formation may, in some embodiments, improve the efficiency with which functional RNPs are assembled. In some embodiments, greater than 90%, greater than 93%, greater than 95%, greater than 96%, greater than 97%, greater than 98% or greater than 99% of RNPs comprising a gNA variant and its spacer are competent for gene editing of a target nucleic acid.

[0173] Exemplary nucleotide changes that can improve the ability of gNA variants to form a complex with CasX protein may, in some embodiments, include replacing the scaffold stem with a thermostable stem loop. Without wishing to be bound by any theory, replacing the scaffold stem with a thermostable stem loop could increase the overall binding stability of the gNA variant with the CasX protein. Alternatively, or in addition, removing a large section of the stem loop could change the gNA variant folding kinetics and make a functional folded gNA easier and quicker to structurally-assemble, for example by lessening the degree to which the gNA variant can get “tangled” in itself. In some embodiments, choice of scaffold stem loop sequence could change with different spacers that are utilized for the gNA. In some embodiments, scaffold sequence can be tailored to the spacer and therefore the target sequence. Biochemical assays can be used to evaluate the binding affinity of CasX protein for the gNA variant to form the RNP, including the assays of the Examples. For example, a person of ordinary skill can measure changes in the amount of a fluorescently tagged gNA that is bound to an immobilized CasX protein, as a response to increasing concentrations of an additional unlabeled “cold competitor” gNA. Alternatively, or in addition, fluorescence signal can be monitored to or seeing how it changes as different amounts of fluorescently labeled gNA are flowed over immobilized CasX protein. Alternatively, the ability to form an RNP can be assessed using in vitro cleavage assays against a defined target nucleic acid sequence.

[0174] i. gNA Stability

[0175] In some embodiments, a gNA variant has improved stability when compared to a reference gRNA. Increased stability and efficient folding may, in some embodiments, increase the extent to which a gNA variant persists inside a target cell, which may thereby increase the chance of forming a functional RNP capable of carrying out CasX functions such as gene editing. Increased stability of gNA variants may also, in some embodiments, allow for a similar outcome with a lower amount of gNA delivered to a cell, which may in turn reduce the chance of off-target effects during gene editing.

[0176] In another aspect, the disclosure provides gNA in which the scaffold stem loop and/or the extended stem loop is replaced with a hairpin loop or a thermostable RNA stem loop in which the resulting gNA has increased stability and, depending on the choice of loop, can interact with certain cellular proteins or RNA. In some embodiments, the replacement RNA loop is selected from MS2, Qβ, U1 hairpin II, Uvsx, PP7, Phage replication loop, Kissing loop_a, Kissing loop_b1, Kissing loop_b2, G quadriplex M3q, G quadriplex telomere basket, Sarcin-ricin loop and Pseudoknots. Sequences of gNA variants including such components are provided in Table 2B.

[0177] Guide RNA stability can be assessed in a variety of ways, including for example in vitro by assembling the guide, incubating for varying periods of time in a solution that mimics the intracellular environment, and then measuring functional activity via the in vitro cleavage assays described herein. Alternatively, or in addition, gNAs can be harvested from cells at varying time points after initial transfection/transduction of the gNA to determine how long gNA variants persist relative to reference gRNAs.

[0178] j. Solubility

[0179] In some embodiments, a gNA variant has improved solubility when compared to a reference gRNA. In some embodiments, a gNA variant has improved solubility of the CasX protein:gNA RNP when compared to a reference gRNA. In some embodiments, solubility of the CasX protein:gNA RNP is improved by the addition of a ribozyme sequence to a 5′ or 3′ end of the gNA variant, for example the 5′ or 3′ of a reference sgRNA. Some ribozymes, such as the M1 ribozyme, can increase solubility of proteins through RNA mediated protein folding.

[0180] Increased solubility of CasX RNPs comprising a gNA variant as described herein can be evaluated through a variety of means known to one of skill in the art, such as by taking densitometry readings on a gel of the soluble fraction of lysed E. coli in which the CasX and gNA variants are expressed.

[0181] k. Resistance to Nuclease Activity

[0182] In some embodiments, a gNA variant has improved resistance to nuclease activity compared to a reference gRNA. Without wishing to be bound by any theory, increased resistance to nucleases, such as nucleases found in cells, may for example increase the persistence of a variant gNA in an intracellular environment, thereby improving gene editing.

[0183] Many nucleases are processive, and degrade RNA in a 3′ to 5′ fashion. Therefore, in some embodiments the addition of a nuclease resistant secondary structure to one or both termini of the gNA, or nucleotide changes that change the secondary structure of a sgNA, can produce gNA variants with increased resistance to nuclease activity. Resistance to nuclease activity may be evaluated through a variety of methods known to one of skill in the art. For example, in vitro methods of measuring resistance to nuclease activity may include for example contacting reference gNA and variants with one or more exemplary RNA nucleases and measuring degradation. Alternatively, or in addition, measuring persistence of a gNA variant in a cellular environment using the methods described herein can indicate the degree to which the gNA variant is nuclease resistant.

[0184] l. Binding Affinity to a Target DNA

[0185] In some embodiments, a gNA variant has improved affinity for the target DNA relative to a reference gRNA. In certain embodiments, a ribonucleoprotein complex comprising a gNA variant has improved affinity for the target DNA, relative to the affinity of an RNP comprising a reference gRNA. In some embodiments, the improved affinity of the RNP for the target DNA comprises improved affinity for the target sequence, improved affinity for the PAM sequence, improved ability of the RNP to search DNA for the target sequence, or any combinations thereof. In some embodiments, the improved affinity for the target DNA is the result of increased overall DNA binding affinity.

[0186] Without wishing to be bound by theory, it is possible that nucleotide changes in the gNA variant that affect the function of the OBD in the CasX protein may increase the affinity of CasX variant protein binding to the protospacer adjacent motif (PAM), as well as the ability to bind or utilize an increased spectrum of PAM sequences other than the canonical TTC PAM recognized by the reference CasX protein of SEQ ID NO: 2, including PAM sequences selected from the group consisting of TTC, ATC, GTC, and CTC, thereby increasing the affinity and diversity of the CasX variant protein for target DNA sequences resulting in a substantial increase in the target nucleic acid sequences that can be edited and/or bound, compared to a reference CasX.

[0187] As described more fully, below, increasing the sequences of the target nucleic acid that can be edited, compared to a reference CasX, refers to both the PAM and the protospacer sequence and their directionality according to the orientation of the non-target strand. This does not imply that the PAM sequence of the non-target strand, rather than the target strand, is determinative of cleavage or mechanistically involved in target recognition. For example, when reference is to a TTC PAM, it may in fact be the complementary GAA sequence that is required for target cleavage, or it may be some combination of nucleotides from both strands. In the case of the CasX proteins disclosed herein, the PAM is located 5′ of the protospacer with at least a single nucleotide separating the PAM from the first nucleotide of the protospacer. Alternatively, or in addition, changes in the gNA that affect function of the helical I and/or helical II domains that increase the affinity of the CasX variant protein for the target DNA strand can increase the affinity of the CasX RNP comprising the variant gNA for target DNA.

[0188] m. Adding or Changing gNA Function

[0189] In some embodiments, gNA variants can comprise larger structural changes that change the topology of the gNA variant with respect to the reference gRNA, thereby allowing for different gNA functionality. For example, in some embodiments a gNA variant has swapped an endogenous stem loop of the reference gRNA scaffold with a previously identified stable RNA structure or a stem loop that can interact with a protein or RNA binding partner to recruit additional moieties to the CasX or to recruit CasX to a specific location, such as the inside of a viral capsid, that has the binding partner to the said RNA structure. In other scenarios the RNAs may be recruited to each other, as in Kissing loops, such that two CasX proteins can be co-localized for more effective gene editing at the target DNA sequence. Such RNA structures may include MS2, Q3, U1 hairpin II, Uvsx, PP7, Phage replication loop, Kissing loop_a, Kissing loop_b1, Kissing loop_b2, G quadriplex M3q, G quadriplex telomere basket, Sarcin-ricin loop, or a Pseudoknot.

[0190] In some embodiments, a gNA variant comprises a terminal fusion partner. Exemplary terminal fusions may include fusion of the gRNA to a self-cleaving ribozyme or protein binding motif. As used herein, a “ribozyme” refers to an RNA or segment thereof with one or more catalytic activities similar to a protein enzyme. Exemplary ribozyme catalytic activities may include, for example, cleavage and/or ligation of RNA, cleavage and/or ligation of DNA, or peptide bond formation. In some embodiments, such fusions could either improve scaffold folding or recruit DNA repair machinery. For example, a gRNA may in some embodiments be fused to a hepatitis delta virus (HDV) antigenomic ribozyme, HDV genomic ribozyme, hatchet ribozyme (from metagenomic data), env25 pistol ribozyme (representative from Aliistipes putredinis), HH15 Minimal Hammerhead ribozyme, tobacco ringspot virus (TRSV) ribozyme, WT viral Hammerhead ribozyme (and rational variants), or Twisted Sister 1 or RBMX recruiting motif. Hammerhead ribozymes are RNA motifs that catalyze reversible cleavage and ligation reactions at a specific site within an RNA molecule. Hammerhead ribozymes include type I, type II and type III hammerhead ribozymes. The HDV, pistol, and hatchet ribozymes have self-cleaving activities. gNA variants comprising one or more ribozymes may allow for expanded gNA function as compared to a gRNA reference. For example, gNAs comprising self-cleaving ribozymes can, in some embodiments, be transcribed and processed into mature gNAs as part of polycistronic transcripts. Such fusions may occur at either the 5′ or the 3′ end of the gNA. In some embodiments, a gNA variant comprises a fusion at both the 5′ and the 3′ end, wherein each fusion is independently as described herein. In some embodiments, a gNA variant comprises a phage replication loop or a tetraloop. In some embodiments, a gNA comprises a hairpin loop that is capable of binding a protein. For example, in some embodiments the hairpin loop is an MS2, Qβ, U1 hairpin II, Uvsx, or PP7 hairpin loop.

[0191] In some embodiments, a gNA variant comprises one or more RNA aptamers. As used herein, an “RNA aptamer” refers to an RNA molecule that binds a target with high affinity and high specificity.

[0192] In some embodiments, a gNA variant comprises one or more riboswitches. As used herein, a “riboswitch” refers to an RNA molecule that changes state upon binding a small molecule.

[0193] In some embodiments, the gNA variant further comprises one or more protein binding motifs. Adding protein binding motifs to a reference gRNA or gNA variant of the disclosure may, in some embodiments, allow a CasX RNP to associate with additional proteins, which can, for example, add the functionality of those proteins to the CasX RNP.

[0194] n. Chemically Modified gNA

[0195] In some embodiments, the disclosure relates to chemically-modified gNA. In some embodiments, the present disclosure provides a chemically-modified gNA that has guide RNA functionality and has reduced susceptibility to cleavage by a nuclease. A gNA that comprises any nucleotide other than the four canonical ribonucleotides A, C, G, and U, or a deoxynucleotide, is a chemically modified gNA. In some cases, a chemically-modified gNA comprises any backbone or internucleotide linkage other than a natural phosphodiester internucleotide linkage. In certain embodiments, the retained functionality includes the ability of the modified gNA to bind to a CasX of any of the embodiments described herein. In certain embodiments, the retained functionality includes the ability of the modified gNA to bind to a SOD1 target nucleic acid sequence. In certain embodiments, the retained functionality includes targeting a CasX protein or the ability of a pre-complexed CasX protein-gNA to bind to a target nucleic acid sequence. In certain embodiments, the retained functionality includes the ability to nick a target polynucleotide by a CasX-gNA. In certain embodiments, the retained functionality includes the ability to cleave a target nucleic acid sequence by a CasX-gNA. In certain embodiments, the retained functionality is any other known function of a gNA in a CasX system with a CasX protein of the embodiments of the disclosure.

[0196] In some embodiments, the disclosure provides a chemically-modified gNA in which a nucleotide sugar modification is incorporated into the gNA selected from the group consisting of 2′-O-C14alkyl such as 2′-O-methyl (2′-OMe), 2′-deoxy (2′-H), 2′-O-C1-3alkyl-O-C1-3alkyl such as 2′-methoxyethyl (“2′-MOE”), 2′-fluoro (“2′-F”), 2′-amino (“2′-NH₂”), 2′-arabinosyl (“2′-arabino”) nucleotide, 2′-F-arabinosyl (“2′-F-arabino”) nucleotide, 2′-locked nucleic acid (“LNA”) nucleotide, 2′-unlocked nucleic acid (“ULNA”) nucleotide, a sugar in L form (“L-sugar”), and 4′-thioribosyl nucleotide. In other embodiments, an internucleotide linkage modification incorporated into the guide RNA is selected from the group consisting of: phosphorothioate “P(S)” (P(S)), phosphonocarboxylate (P(CH₂)ₙCOOR) such as phosphonoacetate “PACE” (P(CH₂COO⁻)), thiophosphonocarboxylate ((S)P(CH₂)ⁿCOOR) such as thiophosphonoacetate “thioPACE” ((S)P(CH₂)ₙCOO⁻)), alkylphosphonate (P(C₁₋₃alkyl) such as methylphosphonate —P(CH₃), boranophosphonate (P(BH₃)), and phosphorodithioate (P(S)₂).

[0197] In certain embodiments, the disclosure provides a chemically-modified gNA in which a nucleobase (“base”) modification is incorporated into the gNA selected from the group consisting of: 2-thiouracil (“2-thioU”), 2-thiocytosine (“2-thioC”), 4-thiouracil (“4-thioU”), 6-thioguanine (“6-thioG”), 2-aminoadenine (“2-aminoA”), 2-aminopurine, pseudouracil, hypoxanthine, 7-deazaguanine, 7-deaza-8-azaguanine, 7-deazaadenine, 7-deaza-8-azaadenine, 5-methylcytosine (“5-methylC”), 5-methyluracil (“5-methylU”), 5-hydroxymethylcytosine, 5-hydroxymethyluracil, 5,6-dehydrouracil, 5-propynylcytosine, 5-propynyluracil, 5-ethynylcytosine, 5-ethynyluracil, 5-allyluracil (“5-allylU”), 5-allylcytosine (“5-allylC”), 5-aminoallyluracil (“5-aminoallylU”), 5-aminoallyl-cytosine (“5-aminoallylC”), an abasic nucleotide, Z base, P base, Unstructured Nucleic Acid (“UNA”), isoguanine (“isoG”), isocytosine (“isoC”), 5-methyl-2-pyrimidine, x(A,G,C,T) and y(A,G,C,T).

[0198] In other embodiments, the disclosure provides a chemically-modified gNA in which one or more isotopic modifications are introduced on the nucleotide sugar, the nucleobase, the phosphodiester linkage and/or the nucleotide phosphates, including nucleotides comprising one or more ¹⁵N, ¹³C, ¹⁴C, deuterium, ³H, ³²P, ¹²⁵I, ¹³¹I atoms or other atoms or elements used as tracers.

[0199] In some embodiments, an “end” modification incorporated into the gNA is selected from the group consisting of: PEG (polyethyleneglycol), hydrocarbon linkers (including: heteroatom (O,S,N)-substituted hydrocarbon spacers; halo-substituted hydrocarbon spacers; keto-, carboxyl-, amido-, thionyl-, carbamoyl-, thionocarbamaoyl-containing hydrocarbon spacers), spermine linkers, dyes including fluorescent dyes (for example fluoresceins, rhodamines, cyanines) attached to linkers such as for example 6-fluorescein-hexyl, quenchers (for example dabcyl, BHQ) and other labels (for example biotin, digoxigenin, acridine, streptavidin, avidin, peptides and/or proteins). In some embodiments, an “end” modification comprises a conjugation (or ligation) of the gNA to another molecule comprising an oligonucleotide of deoxynucleotides and/or ribonucleotides, a peptide, a protein, a sugar, an oligosaccharide, a steroid, a lipid, a folic acid, a vitamin and/or other molecule. In certain embodiments, the disclosure provides a chemically-modified gNA in which an “end” modification (described above) is located internally in the gNA sequence via a linker such as, for example, a 2-(4-butylamidofluorescein)propane-1,3-diol bis(phosphodiester) linker, which is incorporated as a phosphodiester linkage and can be incorporated anywhere between two nucleotides in the gNA.

[0200] In some embodiments, the disclosure provides a chemically-modified gNA having an end modification comprising a terminal functional group such as an amine, a thiol (or sulfhydryl), a hydroxyl, a carboxyl, carbonyl, thionyl, thiocarbonyl, a carbamoyl, a thiocarbamoyl, a phoshoryl, an alkene, an alkyne, an halogen or a functional group-terminated linker that can be subsequently conjugated to a desired moiety selected from the group consisting of a fluorescent dye, a non-fluorescent label, a tag (for ¹⁴C, example biotin, avidin, streptavidin, or moiety containing an isotopic label such as ¹⁵N, ¹³C, deuterium, ³H, ³²p ¹²⁵I and the like), an oligonucleotide (comprising deoxynucleotides and/or ribonucleotides, including an aptamer), an amino acid, a peptide, a protein, a sugar, an oligosaccharide, a steroid, a lipid, a folic acid, and a vitamin. The conjugation employs standard chemistry well-known in the art, including but not limited to coupling via N-hydroxysuccinimide, isothiocyanate, DCC (or DCI), and/or any other standard method as described in “Bioconjugate Techniques” by Greg T. Hermanson, Publisher Eslsevier Science, 3^{rd} ed. (2013), the contents of which are incorporated herein by reference in its entirety.

[0201] IV. Proteins for Modifying a Target Nucleic Acid

[0202] The present disclosure provides systems comprising a CRISPR nuclease that have utility in genome editing of eukaryotic cells. In some embodiments, the CRISPR nuclease is selected from the group consisting of Cas9, Cas12a, Cas12b, Cas12c, Cas12d (CasY), CasX, Cas13a, Cas13b, Cas13c, Cas13d, CasX, CasY, Cas14, Cpf1, C2c1, Csn2, and Cas Phi. In some embodiments, the CRISPR nuclease is a is a Type V CRISPR nuclease. In some embodiments, the present disclosure provides systems comprising a CasX protein and one or more guide nucleic acids (gNA) that are specifically designed to modify a target nucleic acid sequence in eukaryotic cells.

[0203] The term “CasX protein”, as used herein, refers to a family of proteins, and encompasses all naturally occurring CasX proteins, proteins that share at least 50% identity to naturally occurring CasX proteins, as well as CasX variants possessing one or more improved characteristics relative to a naturally-occurring reference CasX protein. CasX proteins belong to CRISPR-Cas Type V proteins. Exemplary improved characteristics of the CasX variant embodiments include, but are not limited to improved folding of the variant, improved binding affinity to the gNA, improved binding affinity to the target nucleic acid, improved ability to utilize a greater spectrum of PAM sequences in the editing and/or binding of target DNA, improved unwinding of the target DNA, increased editing activity, improved editing efficiency, improved editing specificity, increased percentage of a eukaryotic genome that can be efficiently edited, increased activity of the nuclease, increased target strand loading for double strand cleavage, decreased target strand loading for single strand nicking, decreased off-target cleavage, improved binding of the non-target strand of DNA, improved protein stability, improved protein:gNA (RNP) complex stability, improved protein solubility, improved protein:gNA (RNP) complex solubility, improved protein yield, improved protein expression, and improved fusion characteristics, as described more fully, below. In the foregoing embodiments, the one or more of the improved characteristics of an RNP of the CasX variant and the gNA variant is at least about 1.1 to about 100,000-fold improved relative to an RNP of the reference CasX protein of SEQ ID NO: 1, SEQ ID NO: 2, or SEQ ID NO: 3 and the gNA of Table 2A, when assayed in a comparable fashion. In other cases, the one or more improved characteristics of an RNP of the CasX variant and the gNA variant is at least about 1.1, at least about 10, at least about 100, at least about 1000, at least about 10,000, at least about 100,000-fold or more improved relative to an RNP of the reference CasX protein of SEQ ID NO: 1, SEQ ID NO: 2, or SEQ ID NO: 3 and the gNA of Table 2A. In other cases, the one or more of the improved characteristics of an RNP of the CasX variant and the gNA variant is about 1.1 to 100,00-fold, about 1.1 to 10,00-fold, about 1.1 to 1,000-fold, about 1.1 to 500-fold, about 1.1 to 100-fold, about 1.1 to 50-fold, about 1.1 to 20-fold, about 10 to 100,00-fold, about 10 to 10,00-fold, about 10 to 1,000-fold, about 10 to 500-fold, about 10 to 100-fold, about 10 to 50-fold, about 10 to 20-fold, about 2 to 70-fold, about 2 to 50-fold, about 2 to 30-fold, about 2 to 20-fold, about 2 to 10-fold, about 5 to 50-fold, about 5 to 30-fold, about 5 to 10-fold, about 100 to 100,00-fold, about 100 to 10,00-fold, about 100 to 1,000-fold, about 100 to 500-fold, about 500 to 100,00-fold, about 500 to 10,00-fold, about 500 to 1,000-fold, about 500 to 750-fold, about 1,000 to 100,00-fold, about 10,000 to 100,00-fold, about 20 to 500-fold, about 20 to 250-fold, about 20 to 200-fold, about 20 to 100-fold, about 20 to 50-fold, about 50 to 10,000-fold, about 50 to 1,000-fold, about 50 to 500-fold, about 50 to 200-fold, or about 50 to 100-fold, improved relative to an RNP of the reference CasX protein of SEQ ID NO: 1, SEQ ID NO: 2, or SEQ ID NO: 3 and the gNA of Table 2A, when assayed in a comparable fashion. In other cases, the one or more improved characteristics of an RNP of the CasX variant and the gNA variant is about 1.1-fold, 1.2-fold, 1.3-fold, 1.4-fold, 1.5-fold, 1.6-fold, 1.7-fold, 1.8-fold, 1.9-fold, 2-fold, 3-fold, 4-fold, 5-fold, 6-fold, 7-fold, 8-fold, 9-fold, 10-fold, 11-fold, 12-fold, 13-fold, 14-fold, 15-fold, 16-fold, 17-fold, 18-fold, 19-fold, 20-fold, 25-fold, 30-fold, 40-fold, 45-fold, 50-fold, 55-fold, 60-fold, 70-fold, 80-fold, 90-fold, 100-fold, 110-fold, 120-fold, 130-fold, 140-fold, 150-fold, 160-fold, 170-fold, 180-fold, 190-fold, 200-fold, 210-fold, 220-fold, 230-fold, 240-fold, 250-fold, 260-fold, 270-fold, 280-fold, 290-fold, 300-fold, 310-fold, 320-fold, 330-fold, 340-fold, 350-fold, 360-fold, 370-fold, 380-fold, 390-fold, 400-fold, 425-fold, 450-fold, 475-fold, or 500-fold improved relative to an RNP of the reference CasX protein of SEQ ID NO: 1, SEQ ID NO: 2, or SEQ ID NO: 3 and the gNA of Table 2A, when assayed in a comparable fashion.

[0204] The term “CasX variant” is inclusive of variants that are fusion proteins; i.e., the CasX is “fused to” a heterologous sequence. This includes CasX variants comprising CasX variant sequences and N-terminal, C-terminal, or internal fusions of the CasX to a heterologous protein or domain thereof.

[0205] CasX proteins of the disclosure comprise at least one of the following domains: a non-target strand binding (NTSB) domain, a target strand loading (TSL) domain, a helical I domain, a helical II domain, an oligonucleotide binding domain (OBD), and a RuvC DNA cleavage domain (the last of which may be modified or deleted in a catalytically dead CasX variant), described more fully, below. Additionally, the CasX variant proteins of the disclosure have an enhanced ability to efficiently edit and/or bind target DNA, when complexed with a gNA as an RNP, utilizing PAM sequences selected from TTC, ATC, GTC, or CTC, compared to an RNP of a reference CasX protein and reference gNA. In some embodiments, the PAM sequence comprises a TC motif. In the foregoing, the PAM sequence is located at least 1 nucleotide 5′ to the non-target strand of the protospacer having identity with the targeting sequence of the gNA in a assay system compared to the editing efficiency and/or binding of an RNP comprising a reference CasX protein and reference gNA in a comparable assay system. In one embodiment, an RNP of a CasX variant and gNA variant exhibits greater editing efficiency and/or binding of a target sequence in the target DNA compared to an RNP comprising a reference CasX protein and a reference gNA in a comparable assay system, wherein the PAM sequence of the target DNA is TTC. In another embodiment, an RNP of a CasX variant and gNA variant exhibits greater editing efficiency and/or binding of a target sequence in the target DNA compared to an RNP comprising a reference CasX protein and a reference gNA in a comparable assay system, wherein the PAM sequence of the target DNA is ATC. In another embodiment, an RNP of a CasX variant and gNA variant exhibits greater editing efficiency and/or binding of a target sequence in the target DNA compared to an RNP comprising a reference CasX protein and a reference gNA in a comparable assay system, wherein the PAM sequence of the target DNA is CTC. In another embodiment, an RNP of a CasX variant and gNA variant exhibits greater editing efficiency and/or binding of a target sequence in the target DNA compared to an RNP comprising a reference CasX protein and a reference gNA in a comparable assay system, wherein the PAM sequence of the target DNA is GTC.

[0206] In the foregoing embodiments, the increased editing efficiency and/or binding affinity for the one or more PAM sequences is at least about 1.1-fold to at least about 100-fold, or at least about 1.5-fold to at least about 10-fold greater compared to the editing efficiency and/or binding affinity of an RNP of any one of the CasX proteins of SEQ ID NOS: 1-3 and the gNA of Table 2A for the PAM sequences.

[0207] In some cases, the CasX protein is a naturally-occurring protein (e.g., naturally occurs in and is isolated from prokaryotic cells). In other embodiments, the CasX protein is not a naturally-occurring protein (e.g., the CasX protein is a CasX variant protein, a chimeric protein, and the like). A naturally-occurring CasX protein (referred to herein as a “reference CasX protein”) functions as an endonuclease that catalyzes a double strand break at a specific sequence in a targeted double-stranded DNA (dsDNA). The sequence specificity is provided by the targeting sequence of the associated gNA to which it is complexed, which hybridizes to a target sequence within the target nucleic acid.

[0208] In some embodiments, a CasX protein can bind and/or modify (e.g., cleave, nick, methylate, demethylate, etc.) a target nucleic acid and/or a polypeptide associated with target nucleic acid (e.g., methylation or acetylation of a histone tail). In some embodiments, the CasX protein is catalytically dead (dCasX) but retains the ability to bind a target nucleic acid. An exemplary catalytically dead CasX protein comprises one or more mutations in the active site of the RuvC domain of the CasX protein. In some embodiments, a catalytically dead CasX protein comprises substitutions at residues 672, 769 and/or 935 of SEQ ID NO: 1. In one embodiment, a catalytically dead CasX protein comprises substitutions of D672A, E769A and/or D935A in a reference CasX protein of SEQ ID NO: 1. In other embodiments, a catalytically dead CasX protein comprises substitutions at amino acids 659, 756 and/or 922 in a reference CasX protein of SEQ ID NO: 2. In some embodiments, a catalytically dead CasX protein comprises D659A, E756A and/or D922A substitutions in a reference CasX protein of SEQ ID NO: 2. In further embodiments, a catalytically dead CasX protein comprises deletions of all or part of the RuvC domain of the CasX protein. It will be understood that the same foregoing substitutions can similarly be introduced into the CasX variants of the disclosure, resulting in a dCasX variant. In one embodiment, all or a portion of the RuvC domain is deleted from the CasX variant, resulting in a dCasX variant. Catalytically inactive dCasX variant proteins can, in some embodiments, be used for base editing or epigenetic modifications. With a higher affinity for DNA, in some embodiments, catalytically inactive dCasX variant proteins can, relative to catalytically active CasX, find their target nucleic acid faster, remain bound to target nucleic acid for longer periods of time, bind target nucleic acid in a more stable fashion, or a combination thereof, thereby improving these functions of the catalytically dead CasX variant protein compared to a CasX variant that retains its cleavage capability.

[0209] a. Non-Target Strand Binding Domain

[0210] The reference CasX proteins of the disclosure comprise a non-target strand binding domain (NTSBD). The NTSBD is a domain not previously found in any Cas proteins; for example this domain is not present in Cas proteins such as Cas9, Cas12a/Cpf1, Cas13, Cas14, CASCADE, CSM, or CSY. Without being bound to theory or mechanism, a NTSBD in a CasX allows for binding to the non-target DNA strand and may aid in unwinding of the non-target and target strands. The NTSBD is presumed to be responsible for the unwinding, or the capture, of a non-target DNA strand in the unwound state. The NTSBD is in direct contact with the non-target strand in CryoEM model structures derived to date and may contain a non-canonical zinc finger domain. The NTSBD may also play a role in stabilizing DNA during unwinding, guide RNA invasion and R-loop formation. In some embodiments, an exemplary NTSBD comprises amino acids 101-191 of SEQ ID NO: 1 or amino acids 103-192 of SEQ ID NO: 2. In some embodiments, the NTSBD of a reference CasX protein comprises a four-stranded beta sheet.

[0211] b. Target Strand Loading Domain

[0212] The reference CasX proteins of the disclosure comprise a Target Strand Loading (TSL) domain. The TSL domain is a domain not found in certain Cas proteins such as Cas9, CASCADE, CSM, or CSY. Without wishing to be bound by theory or mechanism, it is thought that the TSL domain is responsible for aiding the loading of the target DNA strand into the RuvC active site of a CasX protein. In some embodiments, the TSL acts to place or capture the target-strand in a folded state that places the scissile phosphate of the target strand DNA backbone in the RuvC active site. The TSL comprises a cys4 (CXXC, CXXC zinc finger/ribbon domain (SEQ ID NO: 35) that is separated by the bulk of the TSL. In some embodiments, an exemplary TSL comprises amino acids 825-934 of SEQ ID NO: 1 or amino acids 813-921 of SEQ ID NO: 2.

[0213] c. Helical I Domain

[0214] The reference CasX proteins of the disclosure comprise a helical I domain. Certain Cas proteins other than CasX have domains that may be named in a similar way. However, in some embodiments, the helical I domain of a CasX protein comprises one or more unique structural features, or comprises a unique sequence, or a combination thereof, compared to non-CasX proteins. For example, in some embodiments, the helical I domain of a CasX protein comprises one or more unique secondary structures compared to domains in other Cas proteins that may have a similar name. For example, in some embodiments the helical I domain in a CasX protein comprises one or more alpha helices of unique structure and sequence in arrangement, number and length compared to other CRISPR proteins. In certain embodiments, the helical I domain is responsible for interacting with the bound DNA and spacer of the guide RNA. Without wishing to be bound by theory, it is thought that in some cases the helical I domain may contribute to binding of the protospacer adjacent motif (PAM). In some embodiments, an exemplary helical I domain comprises amino acids 57-100 and 192-332 of SEQ ID NO: 1, or amino acids 59-102 and 193-333 of SEQ ID NO: 2. In some embodiments, the helical I domain of a reference CasX protein comprises one or more alpha helices.

[0215] d. Helical II Domain

[0216] The reference CasX proteins of the disclosure comprise a helical II domain. Certain Cas proteins other than CasX have domains that may be named in a similar way. However, in some embodiments, the helical II domain of a CasX protein comprises one or more unique structural features, or a unique sequence, or a combination thereof, compared to domains in other Cas proteins that may have a similar name. For example, in some embodiments, the helical II domain comprises one or more unique structural alpha helical bundles that align along the target DNA:guide RNA channel. In some embodiments, in a CasX comprising a helical II domain, the target strand and guide RNA interact with helical II (and the helical I domain, in some embodiments) to allow RuvC domain access to the target DNA. The helical II domain is responsible for binding to the guide RNA scaffold stem loop as well as the bound DNA. In some embodiments, an exemplary helical II domain comprises amino acids 333-509 of SEQ ID NO: 1, or amino acids 334-501 of SEQ ID NO: 2.

[0217] e. Oligonucleotide Binding Domain

[0218] The reference CasX proteins of the disclosure comprise an Oligonucleotide Binding Domain (OBD). Certain Cas proteins other than CasX have domains that may be named in a similar way. However, in some embodiments, the OBD comprises one or more unique functional features, or comprises a sequence unique to a CasX protein, or a combination thereof. For example, in some embodiments the bridged helix (BH), helical I domain, helical II domain, and Oligonucleotide Binding Domain (OBD) together are responsible for binding of a CasX protein to the guide RNA. Thus, for example, in some embodiments the OBD is unique to a CasX protein in that it interacts functionally with a helical I domain, or a helical II domain, or both, each of which may be unique to a CasX protein as described herein. Specifically, in CasX the OBD largely binds the RNA triplex of the guide RNA scaffold. The OBD may also be responsible for binding to the protospacer adjacent motif (PAM). An exemplary OBD domain comprises amino acids 1-56 and 510-660 of SEQ ID NO: 1, or amino acids 1-58 and 502-647 of SEQ ID NO: 2.

[0219] f. RuvC DNA Cleavage Domain

[0220] The reference CasX proteins of the disclosure comprise a RuvC domain, that includes 2 partial RuvC domains (RuvC-I and RuvC-II). The RuvC domain is the ancestral domain of all type 12 CRISPR proteins. The RuvC domain originates from a TNPB (transposase B) like transposase. Similar to other RuvC domains, the CasX RuvC domain has a DED catalytic triad that is responsible for coordinating a magnesium (Mg) ion and cleaving DNA. In some embodiments, the RuvC has a DED motif active site that is responsible for cleaving both strands of DNA (one by one, most likely the non-target strand first at 11-14 nucleotides (nt) into the targeted sequence and then the target strand next at 2-4 nucleotides after the target sequence). Specifically in CasX, the RuvC domain is unique in that it is also responsible for binding the guide RNA scaffold stem loop that is critical for CasX function. An exemplary RuvC domain comprises amino acids 661-824 and 935-986 of SEQ ID NO: 1, or amino acids 648-812 and 922-978 of SEQ ID NO: 2.

[0221] g. Reference CasX Proteins

[0222] The disclosure provides reference CasX proteins. In some embodiments, a reference CasX protein is a naturally-occurring protein. For example, reference CasX proteins can be isolated from naturally occurring prokaryotes, such as Deltaproteobacteria, Planctomycetes, or Candidatus Sungbacteria species. A reference CasX protein (sometimes referred to herein as a reference CasX polypeptide) is a type II CRISPR/Cas endonuclease belonging to the CasX (sometimes referred to as Cas12e) family of proteins that is capable of interacting with a guide NA to form a ribonucleoprotein (RNP) complex. In some embodiments, the RNP complex comprising the reference CasX protein can be targeted to a particular site in a target nucleic acid via base pairing between the targeting sequence (or spacer) of the gNA and a target sequence in the target nucleic acid. In some embodiments, the RNP comprising the reference CasX protein is capable of cleaving target DNA. In some embodiments, the RNP comprising the reference CasX protein is capable of nicking target DNA. In some embodiments, the RNP comprising the reference CasX protein is capable of editing target DNA, for example in those embodiments where the reference CasX protein is capable of cleaving or nicking DNA, followed by non-homologous end joining (NHEJ), homology-directed repair (HDR), homology-independent targeted integration (HITI), micro-homology mediated end joining (MMEJ), single strand annealing (SSA) or base excision repair (BER). In some embodiments, the RNP comprises a catalytically dead (is catalytically inactive or has substantially no cleavage activity) CasX protein (dCasX), but retains the ability to bind the target DNA, described more fully, supra.

[0223] In some cases, a reference CasX protein is isolated or derived from Deltaproteobacteria. In some embodiments, a CasX protein comprises a sequence at least 50% identical, at least 60% identical, at least 65% identical, at least 70% identical, at least 75% identical, at least 80% identical, at least 81% identical, at least 82% identical, at least 83% identical, at least 84% identical, at least 85% identical, at least 86% identical, at least 86% identical, at least 87% identical, at least 88% identical, at least 89% identical, at least 89% identical, at least 90% identical, at least 91% identical, at least 92% identical, at least 93% identical, at least 94% identical, at least 95% identical, at least 96% identical, at least 97% identical, at least 98% identical, at least 99% identical, at least 99.5% identical or 100% identical to a sequence of:

| (SEQ ID NO: 1) | |
|---|---|
| 1 | MEKRINKIRK KLSADNATKP VSRSGPMKTL LVRVMTDDLK KRLEKRRKKP EVMPQVISNN |
| 61 | AANNLRMLLD DYTKMKEAIL QVYWQEFKDD HVGLMCKFAQ PASKKIDQNK LKPEMDEKGN |
| 121 | LTTAGFACSQ CGQPLFVYKL EQVSEKGKAY TNYFGRCNVA EHEKLILLAQ LKPEKDSDEA |
| 181 | VTYSLGKFGQ RALDFYSIHV TKESTHPVKP LAQIAGNRYA SGPVGKALSD ACMGTIASFL |
| 241 | SKYQDIIIEH QKVVKGNQKR LESLRELAGK ENLEYPSVTL PPQPHTKEGV DAYNEVIARV |
| 301 | RMWVNLNLWQ KLKLSRDDAK PLLRLKGFPS FPVVERRENE VDWWNTINEV KKLIDAKRDM |
| 361 | GRVFWSGVTA EKRNTILEGY NYLPNENDHK KREGSLENPK KPAKRQFGDL LLYLEKKYAG |
| 421 | DWGKVFDEAW ERIDKKIAGL TSHIEREEAR NAEDAQSKAV LTDWLRAKAS FVLERLKEMD |
| 481 | EKEFYACEIQ LQKWYGDLRG NPFAVEAENR VVDISGFSIG SDGHSIQYRN LLAWKYLENG |
| 541 | KREFYLLMNY GKKGRIRFTD GTDIKKSGKW QGLLYGGGKA KVIDLTFDPD DEQLIILPLA |
| 601 | FGTRQGREFI WNDLLSLETG LIKLANGRVI EKTIYNKKIG RDEPALFVAL TFERREVVDP |
| 661 | SNIKPVNLIG VDRGENIPAV IALTDPEGCP LPEFKDSSGG PTDILRIGEG YKEKQRAIQA |
| 721 | AKEVEQRRAG GYSRKFASKS RNLADDMVRN SARDLFYHAV THDAVLVFEN LSRGFGRQGK |
| 781 | RTFMTERQYT KMEDWLTAKL AYEGLTSKTY LSKTLAQYTS KTCSNCGFTI TTADYDGMLV |
| 841 | RLKKTSDGWA TTLNNKELKA EGQITYYNRY KRQTVEKELS AELDRLSEES GNNDISKWTK |
| 901 | GRRDEALFLL KKRFSHRPVQ EQFVCLDCGH EVHADEQAAL NIARSWLFLN SNSTEFKSYK |
| 961 | SGKQPFVGAW QAFYKRRLKE VWKPNA. |

[0224] In some cases, a reference CasX protein is isolated or derived from Planctomycetes. In some embodiments, a CasX protein comprises a sequence at least 50% identical, at least 60% identical, at least 65% identical, at least 70% identical, at least 75% identical, at least 80% identical, at least 81% identical, at least 82% identical, at least 83% identical, at least 84% identical, at least 85% identical, at least 86% identical, at least 86% identical, at least 87% identical, at least 88% identical, at least 89% identical, at least 89% identical, at least 90% identical, at least 91% identical, at least 92% identical, at least 93% identical, at least 94% identical, at least 95% identical, at least 96% identical, at least 97% identical, at least 98% identical, at least 99% identical, at least 99.5% identical or 100% identical to a sequence of:

| (SEQ ID NO: 2) | |
|---|---|
| 1 | MQEIKRINKI RRRLVKDSNT KKAGKTGPMK TLLVRVMTPD LRERLENLRK KPENIPQPIS |
| 61 | NTSRANLNKL LTDYTEMKKA ILHVYWEEFQ KDPVGLMSRV AQPAPKNIDQ RKLIPVKDGN |
| 121 | ERLTSSGFAC SQCCQPLYVY KLEQVNDKGK PHTNYFGRCN VSEHERLILL SPHKPEANDE |
| 181 | LVTYSLGKFG QRALDFYSIH VTRESNHPVK PLEQIGGNSC ASGPVGKALS DACMGAVASF |
| 241 | LTKYQDIILE HQKVIKKNEK RLANLKDIAS ANGLAFPKIT LPPQPHTKEG IEAYNNVVAQ |
| 301 | IVIWVNLNLW QKLKIGRDEA KPLQRLKGFP SFPLVERQAN EVDWWDMVCN VKKLINEKKE |
| 361 | DGKVFWQNLA GYKRQEALLP YLSSEEDRKK GKKFARYQFG DLLLHLEKKH GEDWGKVYDE |
| 421 | AWERIDKKVE GLSKHIKLEE ERRSEDAQSK AALTDWLRAK ASFVIEGLKE ADKDEFCRCE |
| 481 | LKLQKWYGDL RGKPFAIEAE NSILDISGFS KQYNCAFIWQ KDGVKKLNLY LIINYFKGGK |
| 541 | LRFKKIKPEA FEANRFYTVI NKKSGEIVPM EVNFNFDDPN LIILPLAFGK RQGREFIWND |
| 601 | LLSLETGSLK LANGRVIEKT LYNRRTRQDE PALFVALTFE RREVLDSSNI KPMNLIGIDR |
| 661 | GENIPAVIAL TDPEGCPLSR FKDSLGNPTH ILRIGESYKE KQRTIQAAKE VEQRRAGGYS |
| 721 | RKYASKAKNL ADDMVRNTAR DLLYYAVTQD AMLIFENLSR GFGRQGKRTF MAERQYTRME |
| 781 | DWLTAKLAYE GLPSKTYLSK TLAQYTSKTC SNCGFTITSA DYDRVLEKLK KTATGWMTTI |
| 841 | NGKELKVEGQ ITYYNRYKRQ NVVKDLSVEL DRLSEESVNN DISSWTKGRS GEALSLLKKR |
| 901 | FSHRPVQEKF VCLNCGFETH ADEQAALNIA RSWLFLRSQE YKKYQTNKTT GNTDKRAFVE |
| 961 | TWQSFYRKKL KEVWKPAV. |

[0225] In some embodiments, the CasX protein comprises the sequence of SEQ ID NO: 2, or at least 60% similarity thereto. In some embodiments, the CasX protein comprises the sequence of SEQ ID NO: 2, or at least 80% similarity thereto. In some embodiments, the CasX protein comprises the sequence of SEQ ID NO: 2, or at least 90% similarity thereto. In some embodiments, the CasX protein comprises the sequence of SEQ ID NO: 2, or at least 95% similarity thereto. In some embodiments, the CasX protein consists of the sequence of SEQ ID NO: 2. In some embodiments, the CasX protein comprises or consists of a sequence that has at least 1, at least 2, at least 3, at least 4, at least 5, at least 6, at least 7, at least 8, at least 9, at least 10, at least 20, at least 30, at least 40 or at least 50 mutations relative to the sequence of SEQ ID NO: 2. These mutations can be insertions, deletions, amino acid substitutions, or any combinations thereof.

[0226] In some cases, a reference CasX protein is isolated or derived from Candidatus Sungbacteria. In some embodiments, a CasX protein comprises a sequence at least 50% identical, at least 60% identical, at least 65% identical, at least 70% identical, at least 75% identical, at least 80% identical, at least 81% identical, at least 82% identical, at least 83% identical, at least 84% identical, at least 85% identical, at least 86% identical, at least 86% identical, at least 87% identical, at least 88% identical, at least 89% identical, at least 89% identical, at least 90% identical, at least 91% identical, at least 92% identical, at least 93% identical, at least 94% identical, at least 95% identical, at least 96% identical, at least 97% identical, at least 98% identical, at least 99% identical, at least 99.5% identical or 100% identical to a sequence of

| (SEQ ID NO: 3) | |
|---|---|
| 1 | MDNANKPSTK SLVNTTRISD HFGVTPGQVT RVFSFGIIPT KRQYAIIERW FAAVEAARER |
| 61 | LYGMLYAHFQ ENPPAYLKEK FSYETFFKGR PVLNGLRDID PTIMTSAVFT ALRHKAEGAM |
| 121 | AAFHTNHRRL FEEARKKMRE YAECLKANEA LLRGAADIDW DKIVNALRTR LNTCLAPEYD |
| 181 | AVIADFGALC AFRALIAETN ALKGAYNHAL NQMLPALVKV DEPEEAEESP RLRFFNGRIN |
| 241 | DLPKFPVAER ETPPDTETII RQLEDMARVI PDTAEILGYI HRIRHKAARR KPGSAVPLPQ |
| 301 | RVALYCAIRM ERNPEEDPST VAGHFLGEID RVCEKRRQGL VRTPFDSQIR ARYMDIISFR |
| 361 | ATLAHPDRWT EIQFLRSNAA SRRVRAETIS APFEGFSWTS NRTNPAPQYG MALAKDANAP |
| 421 | ADAPELCICL SPSSAAFSVR EKGGDLIYMR PTGGRRGKDN PGKEITWVPG SFDEYPASGV |
| 481 | ALKLRLYFGR SQARRMLTNK TWGLLSDNPR VFAANAELVG KKRNPQDRWK LFFHMVISGP |
| 541 | PPVEYLDFSS DVRSRARTVI GINRGEVNPL AYAVVSVEDG QVLEEGLLGK KEYIDQLIET |
| 601 | RRRISEYQSR EQTPPRDLRQ RVRHLQDTVL GSARAKIHSL IAFWKGILAI ERLDDQFHGR |
| 661 | EQKIIPKKTY LANKTGFMNA LSFSGAVRVD KKGNPWGGMI EIYPGGISRT CTQCGTVWLA |
| 721 | RRPKNPGHRD AMVVIPDIVD DAAATGFDNV DCDAGTVDYG ELFTLSREWV RLTPRYSRVM |
| 781 | RGTLGDLERA IRQGDDRKSR QMLELALEPQ PQWGQFFCHR CGFNGQSDVL AATNLARRAI |
| 841 | SLIRRLPDTD TPPTP. |

[0227] In some embodiments, the CasX protein comprises the sequence of SEQ ID NO: 3, or at least 60% similarity thereto. In some embodiments, the CasX protein comprises the sequence of SEQ ID NO: 3, or at least 80% similarity thereto. In some embodiments, the CasX protein comprises the sequence of SEQ ID NO: 3, or at least 90% similarity thereto. In some embodiments, the CasX protein comprises the sequence of SEQ ID NO: 3, or at least 95% similarity thereto. In some embodiments, the CasX protein consists of the sequence of SEQ ID NO: 3. In some embodiments, the CasX protein comprises or consists of a sequence that has at least 1, at least 2, at least 3, at least 4, at least 5, at least 6, at least 7, at least 8, at least 9, at least 10, at least 20, at least 30, at least 40 or at least 50 mutations relative to the sequence of SEQ ID NO: 3. These mutations can be insertions, deletions, amino acid substitutions, or any combinations thereof.

[0228] h. CasX Variant Proteins

[0229] The present disclosure provides variants of a reference CasX protein (interchangeably referred to herein as “CasX variant” or “CasX variant protein”), wherein the CasX variants comprise at least one modification in at least one domain of the reference CasX protein, including the sequences of SEQ ID NOS: 1-3. In some embodiments, the CasX variant exhibits at least one improved characteristic compared to the reference CasX protein. All variants that improve one or more functions or characteristics of the CasX variant protein when compared to a reference CasX protein described herein are envisaged as being within the scope of the disclosure. In some embodiments, the modification is a mutation in one or more amino acids of the reference CasX. In other embodiments, the modification is a substitution of one or more domains of the reference CasX with one or more domains from a different CasX. In some embodiments, insertion includes the insertion of a part or all of a domain from a different CasX protein. Mutations can occur in any one or more domains of the reference CasX protein, and may include, for example, deletion of part or all of one or more domains, or one or more amino acid substitutions, deletions, or insertions in any domain of the reference CasX protein. The domains of CasX proteins include the non-target strand binding (NTSB) domain, the target strand loading (TSL) domain, the helical I domain, the helical II domain, the oligonucleotide binding domain (OBD), and the RuvC DNA cleavage domain. Any change in amino acid sequence of a reference CasX protein that leads to an improved characteristic of the CasX protein is considered a CasX variant protein of the disclosure. For example, CasX variants can comprise one or more amino acid substitutions, insertions, deletions, or swapped domains, or any combinations thereof, relative to a reference CasX protein sequence.

[0230] In some embodiments, the CasX variant protein comprises at least one modification in at least each of two domains of the reference CasX protein, including the sequences of SEQ ID NOS:1-3. In some embodiments, the CasX variant protein comprises at least one modification in at least 2 domains, in at least 3 domains, at least 4 domains or at least 5 domains of the reference CasX protein. In some embodiments, the CasX variant protein comprises two or more modifications in at least one domain of the reference CasX protein. In some embodiments, the CasX variant protein comprises at least two modifications in at least one domain of the reference CasX protein, at least three modifications in at least one domain of the reference CasX protein or at least four modifications in at least one domain of the reference CasX protein. In some embodiments, wherein the CasX variant comprises two or more modifications compared to a reference CasX protein, each modification is made in a domain independently selected from the group consisting of a NTSBD, TSLD, Helical I domain, Helical II domain, OBD, and RuvC DNA cleavage domain.

[0231] In some embodiments, the at least one modification of the CasX variant protein comprises a deletion of at least a portion of one domain of the reference CasX protein, including the sequences of SEQ ID NOS:1-3. In some embodiments, the deletion is in the NTSBD, TSLD, Helical I domain, Helical II domain, OBD, or RuvC DNA cleavage domain.

[0232] Suitable mutagenesis methods for generating CasX variant proteins of the disclosure may include, for example, Deep Mutational Evolution (DME; described in the Examples), deep mutational scanning (DMS), error prone PCR, cassette mutagenesis, random mutagenesis, staggered extension PCR, gene shuffling, or domain swapping. In some embodiments, the CasX variants are designed, for example by selecting one or more desired mutations in a reference CasX. In certain embodiments, the activity of a reference CasX protein is used as a benchmark against which the activity of one or more CasX variants are compared, thereby measuring improvements in function of the CasX variants. Exemplary improvements of CasX variants include, but are not limited to, improved folding of the variant, improved binding affinity to the gNA, improved binding affinity to the target DNA, altered binding affinity to one or more PAM sequences, improved unwinding of the target DNA, increased activity, improved editing efficiency, improved editing specificity, increased activity of the nuclease, increased target strand loading for double strand cleavage, decreased target strand loading for single strand nicking, decreased off-target cleavage, improved binding of the non-target strand of DNA, improved protein stability, improved protein:gNA complex stability, improved protein solubility, improved protein:gNA complex solubility, improved protein yield, improved protein expression, and improved fusion characteristics, as described more fully, below.

[0233] In some embodiments of the CasX variants described herein, the at least one modification comprises: (a) a substitution of 1 to 100 consecutive or non-consecutive amino acids in the CasX variant compared to a reference CasX of SEQ ID NO: 1, SEQ ID NO: 2, or SEQ ID NO: 3; (b) a deletion of 1 to 100 consecutive or non-consecutive amino acids in the CasX variant compared to a reference CasX; (c) an insertion of 1 to 100 consecutive or non-consecutive amino acids in the CasX compared to a reference CasX; or (d) any combination of (a)-(c). In some embodiments, the at least one modification comprises: (a) a substitution of 5-10 consecutive or non-consecutive amino acids in the CasX variant compared to a reference CasX of SEQ ID NO: 1, SEQ ID NO: 2, or SEQ ID NO: 3; (b) a deletion of 1-5 consecutive or non-consecutive amino acids in the CasX variant compared to a reference CasX; (c) an insertion of 1-5 consecutive or non-consecutive amino acids in the CasX compared to a reference CasX; or (d) any combination of (a)-(c).

[0234] In some embodiments, the CasX variant protein comprises or consists of a sequence that has at least 1, at least 2, at least 3, at least 4, at least 5, at least 6, at least 7, at least 8, at least 9, at least 10, at least 20, at least 30, at least 40 or at least 50 mutations relative to the sequence of SEQ ID NO: 1, SEQ ID NO: 2, or SEQ ID NO: 3. These mutations can be insertions, deletions, amino acid substitutions, or any combinations thereof.

[0235] In some embodiments, the CasX variant protein comprises at least one amino acid substitution in at least one domain of a reference CasX protein. In some embodiments, the CasX variant protein comprises at least about 1-4 amino acid substitutions, 1-10 amino acid substitutions, 1-20 amino acid substitutions, 1-30 amino acid substitutions, 1-40 amino acid substitutions, 1-50 amino acid substitutions, 1-60 amino acid substitutions, 1-70 amino acid substitutions, 1-80 amino acid substitutions, 1-90 amino acid substitutions, 1-100 amino acid substitutions, 2-10 amino acid substitutions, 2-20 amino acid substitutions, 2-30 amino acid substitutions, 3-10 amino acid substitutions, 3-20 amino acid substitutions, 3-30 amino acid substitutions, 4-10 amino acid substitutions, 4-20 amino acid substitutions, 3-300 amino acid substitutions, 5-10 amino acid substitutions, 5-20 amino acid substitutions, 5-30 amino acid substitutions, 10-50 amino acid substitutions, or 20-50 amino acid substitutions, relative to a reference CasX protein. In some embodiments, the CasX variant protein comprises at least about 100 amino acid substitutions relative to a reference CasX protein. In some embodiments, the CasX variant protein comprises 1, 2, 3, 4, 5, 6, 7, 8, 9 or 10 amino acid substitutions relative to a reference CasX protein. In some embodiments, the CasX variant protein comprises 1, 2, 3, 4, 5, 6, 7, 8, 9 or 10 amino acid substitutions in a single domain relative to the reference CasX protein. In some embodiments, the amino acid substitutions are conservative substitutions. In other embodiments, the substitutions are non-conservative; e.g., a polar amino acid is substituted for a non-polar amino acid, or vice versa.

[0236] In some embodiments, a CasX variant protein comprises 1 amino acid substitution, 2-3 consecutive amino acid substitutions, 2-4 consecutive amino acid substitutions, 2-5 consecutive amino acid substitutions, 2-6 consecutive amino acid substitutions, 2-7 consecutive amino acid substitutions, 2-8 consecutive amino acid substitutions, 2-9 consecutive amino acid substitutions, 2-10 consecutive amino acid substitutions, 2-20 consecutive amino acid substitutions, 2-30 consecutive amino acid substitutions, 2-40 consecutive amino acid substitutions, 2-50 consecutive amino acid substitutions, 2-60 consecutive amino acid substitutions, 2-70 consecutive amino acid substitutions, 2-80 consecutive amino acid substitutions, 2-90 consecutive amino acid substitutions, 2-100 consecutive amino acid substitutions, 3-10 consecutive amino acid substitutions, 3-20 consecutive amino acid substitutions, 3-30 consecutive amino acid substitutions, 4-10 consecutive amino acid substitutions, 4-20 consecutive amino acid substitutions, 3-300 consecutive amino acid substitutions, 5-10 consecutive amino acid substitutions, 5-20 consecutive amino acid substitutions, 5-30 consecutive amino acid substitutions, 10-50 consecutive amino acid substitutions or 20-50 consecutive amino acid substitutions relative to a reference CasX protein. In some embodiments, a CasX variant protein comprises 2, 3, 4, 5, 6, 7, 8, 9, 10, 11, 12, 13, 14, 15, 16, 17, 18, 19 or 20 consecutive amino acid substitutions. In some embodiments, a CasX variant protein comprises a substitution of at least about 100 consecutive amino acids. As used herein “consecutive amino acids” refer to amino acids that are contiguous in the primary sequence of a polypeptide.

[0237] In some embodiments, a CasX variant protein comprises two or more substitutions relative to a reference CasX protein, and the two or more substitutions are not in consecutive amino acids of the reference CasX sequence. For example, a first substitution may be in a first domain of the reference CasX protein, and a second substitution may be in a second domain of the reference CasX protein. In some embodiments, a CasX variant protein comprises 2, 3, 4, 5, 6, 7, 8, 9, 10, 11, 12, 13, 14, 15, 16, 17, 18, 19 or 20 non-consecutive substitutions relative to a reference CasX protein. In some embodiments, a CasX variant protein comprises at least 20 non-consecutive substitutions relative to a reference CasX protein. Each non-consecutive substitution may be of any length of amino acids described herein, e.g., 1-4 amino acids, 1-10 amino acids, and the like. In some embodiments, the two or more substitutions relative to the reference CasX protein are not the same length, for example one substitution is one amino acid and a second substitution is three amino acids. In some embodiments, the two or more substitutions relative to the reference CasX protein are the same length, for example both substitutions are two consecutive amino acids in length.

[0238] Any amino acid can be substituted for any other amino acid in the substitutions described herein. The substitution can be a conservative substitution (e.g., a basic amino acid is substituted for another basic amino acid). The substitution can be a non-conservative substitution (e.g., a basic amino acid is substituted for an acidic amino acid or vice versa). For example, a proline in a reference CasX protein can be substituted for any of arginine, histidine, lysine, aspartic acid, glutamic acid, serine, threonine, asparagine, glutamine, cysteine, glycine, alanine, isoleucine, leucine, methionine, phenylalanine, tryptophan, tyrosine or valine to generate a CasX variant protein of the disclosure.

[0239] In some embodiments, a CasX variant protein comprises at least one amino acid deletion relative to a reference CasX protein. In some embodiments, a CasX variant protein comprises a deletion of 1-4 amino acids, 1-10 amino acids, 1-20 amino acids, 1-30 amino acids, 1-40 amino acids, 1-50 amino acids, 1-60 amino acids, 1-70 amino acids, 1-80 amino acids, 1-90 amino acids, 1-100 amino acids, 2-10 amino acids, 2-20 amino acids, 2-30 amino acids, 3-10 amino acids, 3-20 amino acids, 3-30 amino acids, 4-10 amino acids, 4-20 amino acids, 3-300 amino acids, 5-10 amino acids, 5-20 amino acids, 5-30 amino acids, 10-50 amino acids or 20-50 amino acids relative to a reference CasX protein. In some embodiments, a CasX protein comprises a deletion of at least about 100 consecutive amino acids relative to a reference CasX protein. In some embodiments, a CasX variant protein comprises a deletion of at least 1, 2, 3, 4, 5, 6, 7, 8, 9, 10, 20, 30, 40, 50 or 100 consecutive amino acids relative to a reference CasX protein. In some embodiments, a CasX variant protein comprises a deletion of 1, 2, 3, 4, 5, 6, 7, 8, 9 or 10 consecutive amino acids.

[0240] In some embodiments, a CasX variant protein comprises two or more deletions relative to a reference CasX protein, and the two or more deletions are not consecutive amino acids. For example, a first deletion may be in a first domain of the reference CasX protein, and a second deletion may be in a second domain of the reference CasX protein. In some embodiments, a CasX variant protein comprises 2, 3, 4, 5, 6, 7, 8, 9, 10, 11, 12, 13, 14, 15, 16, 17, 18, 19 or 20 non-consecutive deletions relative to a reference CasX protein. In some embodiments, a CasX variant protein comprises at least 20 non-consecutive deletions relative to a reference CasX protein. Each non-consecutive deletion may be of any length of amino acids described herein, e.g., 1-4 amino acids, 1-10 amino acids, and the like.

[0241] In some embodiments, the CasX variant protein comprises at least one amino acid insertion relative to the sequence of SEQ ID NOS:1, 2, or 3. In some embodiments, a CasX variant protein comprises an insertion of 1 amino acid, an insertion of 2-3 consecutive amino acids, 2-4 consecutive amino acids, 2-5 consecutive amino acids, 2-6 consecutive amino acids, 2-7 consecutive amino acids, 2-8 consecutive amino acids, 2-9 consecutive amino acids, 2-10 consecutive amino acids, 2-20 consecutive amino acids, 2-30 consecutive amino acids, 2-40 consecutive amino acids, 2-50 consecutive amino acids, 2-60 consecutive amino acids, 2-70 consecutive amino acids, 2-80 consecutive amino acids, 2-90 consecutive amino acids, 2-100 consecutive amino acids, 3-10 consecutive amino acids, 3-20 consecutive amino acids, 3-30 consecutive amino acids, 4-10 consecutive amino acids, 4-20 consecutive amino acids, 3-300 consecutive amino acids, 5-10 consecutive amino acids, 5-20 consecutive amino acids, 5-30 consecutive amino acids, 10-50 consecutive amino acids or 20-50 consecutive amino acids relative to a reference CasX protein. In some embodiments, the CasX variant protein comprises an insertion of 2, 3, 4, 5, 6, 7, 8, 9, 10, 11, 12, 13, 14, 15, 16, 17, 18, 19 or 20 consecutive amino acids. In some embodiments, a CasX variant protein comprises an insertion of at least about 100 consecutive amino acids.

[0242] In some embodiments, a CasX variant protein comprises two or more insertions relative to a reference CasX protein, and the two or more insertions are not consecutive amino acids of the sequence. For example, a first insertion may be in a first domain of the reference CasX protein, and a second insertion may be in a second domain of the reference CasX protein. In some embodiments, a CasX variant protein comprises 2, 3, 4, 5, 6, 7, 8, 9, 10, 11, 12, 13, 14, 15, 16, 17, 18, 19 or 20 non-consecutive insertions relative to a reference CasX protein. In some embodiments, a CasX variant protein comprises at least 10 to about 20 or more non-consecutive insertions relative to a reference CasX protein. Each non-consecutive insertion may be of any length of amino acids described herein, e.g., 1-4 amino acids, 1-10 amino acids, and the like.

[0243] Any amino acid, or combination of amino acids, can be inserted in the insertions described herein. For example, a proline, arginine, histidine, lysine, aspartic acid, glutamic acid, serine, threonine, asparagine, glutamine, cysteine, glycine, alanine, isoleucine, leucine, methionine, phenylalanine, tryptophan, tyrosine or valine or any combination thereof can be inserted into a reference CasX protein of the disclosure to generate a CasX variant protein.

[0244] Any permutation of the substitution, insertion and deletion embodiments described herein can be combined to generate a CasX variant protein of the disclosure. For example, a CasX variant protein can comprise at least one substitution and at least one deletion relative to a reference CasX protein sequence, at least one substitution and at least one insertion relative to a reference CasX protein sequence, at least one insertion and at least one deletion relative to a reference CasX protein sequence, or at least one substitution, one insertion and one deletion relative to a reference CasX protein sequence.

[0245] In some embodiments, the CasX variant protein has at least about 60% sequence similarity, at least 70% similarity, at least 80% similarity, at least 85% similarity, at least 86% similarity, at least 87% similarity, at least 88% similarity, at least 89% similarity, at least 90% similarity, at least 91% similarity, at least 92% similarity, at least 93% similarity, at least 94% similarity, at least 95% similarity, at least 96% similarity, at least 97% similarity, at least 98% similarity, at least 99% similarity, at least 99.5% similarity, at least 99.6% similarity, at least 99.7% similarity, at least 99.8% similarity or at least 99.9% similarity to one of SEQ ID NO: 1, SEQ ID NO: 2, or SEQ ID NO: 3.

[0246] In some embodiments, the CasX variant protein has at least about 60% sequence similarity to SEQ ID NO: 2 or a portion thereof. In some embodiments, the CasX variant protein comprises a substitution of Y789T of SEQ ID NO: 2, a deletion of P793 of SEQ ID NO: 2, a substitution of Y789D of SEQ ID NO: 2, a substitution of T72S of SEQ ID NO: 2, a substitution of 1546V of SEQ ID NO: 2, a substitution of E552A of SEQ ID NO: 2, a substitution of A636D of SEQ ID NO: 2, a substitution of F536S of SEQ ID NO:2, a substitution of A708K of SEQ ID NO: 2, a substitution of Y797L of SEQ ID NO: 2, a substitution of L792G SEQ ID NO: 2, a substitution of A739V of SEQ ID NO: 2, a substitution of G791M of SEQ ID NO: 2, an insertion of A at position 661 of SEQ ID NO: 2, a substitution of A788W of SEQ ID NO: 2, a substitution of K390R of SEQ ID NO: 2, a substitution of A751S of SEQ ID NO: 2, a substitution of E385A of SEQ ID NO: 2, an insertion of P at position 696 of SEQ ID NO: 2, an insertion of M at position 773 of SEQ ID NO: 2, a substitution of G695H of SEQ ID NO: 2, an insertion of AS at position 793 of SEQ ID NO: 2, an insertion of AS at position 795 of SEQ ID NO: 2, a substitution of C477R of SEQ ID NO: 2, a substitution of C477K of SEQ ID NO: 2, a substitution of C479A of SEQ ID NO: 2, a substitution of C479L of SEQ ID NO: 2, a substitution of I55F of SEQ ID NO: 2, a substitution of K210R of SEQ ID NO: 2, a substitution of C233S of SEQ ID NO: 2, a substitution of D231N of SEQ ID NO: 2, a substitution of Q338E of SEQ ID NO: 2, a substitution of Q338R of SEQ ID NO: 2, a substitution of L379R of SEQ ID NO: 2, a substitution of K390R of SEQ ID NO: 2, a substitution of L481Q of SEQ ID NO: 2, a substitution of F495S of SEQ ID NO:2, a substitution of D600N of SEQ ID NO: 2, a substitution of T886K of SEQ ID NO: 2, a substitution of A739V of SEQ ID NO: 2, a substitution of K460N of SEQ ID NO: 2, a substitution of I199F of SEQ ID NO: 2, a substitution of G492P of SEQ ID NO: 2, a substitution of T153I of SEQ ID NO: 2, a substitution of R591I of SEQ ID NO: 2, an insertion of AS at position 795 of SEQ ID NO: 2, an insertion of AS at position 796 of SEQ ID NO:2, an insertion of L at position 889 of SEQ ID NO: 2, a substitution of E121D of SEQ ID NO: 2, a substitution of S270W of SEQ ID NO: 2, a substitution of E712Q of SEQ ID NO: 2, a substitution of K942Q of SEQ ID NO: 2, a substitution of E552K of SEQ ID NO:2, a substitution of K25Q of SEQ ID NO: 2, a substitution of N47D of SEQ ID NO: 2, an insertion of T at position 696 of SEQ ID NO: 2, a substitution of L685I of SEQ ID NO: 2, a substitution of N880D of SEQ ID NO: 2, a substitution of Q102R of SEQ ID NO: 2, a substitution of M734K of SEQ ID NO: 2, a substitution of A724S of SEQ ID NO: 2, a substitution of T704K of SEQ ID NO: 2, a substitution of P224K of SEQ ID NO: 2, a substitution of K25R of SEQ ID NO: 2, a substitution of M29E of SEQ ID NO: 2, a substitution of H152D of SEQ ID NO: 2, a substitution of S219R of SEQ ID NO: 2, a substitution of E475K of SEQ ID NO: 2, a substitution of G226R of SEQ ID NO: 2, a substitution of A377K of SEQ ID NO: 2, a substitution of E480K of SEQ ID NO: 2, a substitution of K416E of SEQ ID NO: 2, a substitution of H164R of SEQ ID NO: 2, a substitution of K767R of SEQ ID NO: 2, a substitution of I7F of SEQ ID NO: 2, a substitution of M29R of SEQ ID NO: 2, a substitution of H435R of SEQ ID NO: 2, a substitution of E385Q of SEQ ID NO: 2, a substitution of E385K of SEQ ID NO: 2, a substitution of I279F of SEQ ID NO: 2, a substitution of D489S of SEQ ID NO: 2, a substitution of D732N of SEQ ID NO: 2, a substitution of A739T of SEQ ID NO: 2, a substitution of W885R of SEQ ID NO: 2, a substitution of E53K of SEQ ID NO: 2, a substitution of A238T of SEQ ID NO: 2, a substitution of P283Q of SEQ ID NO: 2, a substitution of E292K of SEQ ID NO: 2, a substitution of Q628E of SEQ ID NO: 2, a substitution of R388Q of SEQ ID NO: 2, a substitution of G791M of SEQ ID NO: 2, a substitution of L792K of SEQ ID NO: 2, a substitution of L792E of SEQ ID NO: 2, a substitution of M779N of SEQ ID NO: 2, a substitution of G27D of SEQ ID NO: 2, a substitution of K955R of SEQ ID NO: 2, a substitution of S867R of SEQ ID NO: 2, a substitution of R693I of SEQ ID NO: 2, a substitution of F189Y of SEQ ID NO: 2, a substitution of V635M of SEQ ID NO: 2, a substitution of F399L of SEQ ID NO: 2, a substitution of E498K of SEQ ID NO: 2, a substitution of E386R of SEQ ID NO: 2, a substitution of V254G of SEQ ID NO: 2, a substitution of P793S of SEQ ID NO: 2, a substitution of K188E of SEQ ID NO: 2, a substitution of QT945KI of SEQ ID NO: 2, a substitution of T620P of SEQ ID NO: 2, a substitution of T946P of SEQ ID NO: 2, a substitution of TT949PP of SEQ ID NO: 2, a substitution of N952T of SEQ ID NO: 2, a substitution of K682E of SEQ ID NO: 2, a substitution of K975R of SEQ ID NO: 2, a substitution of L212P of SEQ ID NO: 2, a substitution of E292R of SEQ ID NO: 2, a substitution of I303K of SEQ ID NO: 2, a substitution of C349E of SEQ ID NO: 2, a substitution of E385P of SEQ ID NO: 2, a substitution of E386N of SEQ ID NO: 2, a substitution of D387K of SEQ ID NO: 2, a substitution of L404K of SEQ ID NO: 2, a substitution of E466H of SEQ ID NO: 2, a substitution of C477Q of SEQ ID NO: 2, a substitution of C477H of SEQ ID NO: 2, a substitution of C479A of SEQ ID NO: 2, a substitution of D659H of SEQ ID NO: 2, a substitution of T806V of SEQ ID NO: 2, a substitution of K808S of SEQ ID NO: 2, an insertion of AS at position 797 of SEQ ID NO: 2, a substitution of V959M of SEQ ID NO: 2, a substitution of K975Q of SEQ ID NO: 2, a substitution of W974G of SEQ ID NO: 2, a substitution of A708Q of SEQ ID NO: 2, a substitution of V711K of SEQ ID NO: 2, a substitution of D733T of SEQ ID NO: 2, a substitution of L742W of SEQ ID NO: 2, a substitution of V747K of SEQ ID NO: 2, a substitution of F755M of SEQ ID NO: 2, a substitution of M771A of SEQ ID NO: 2, a substitution of M771Q of SEQ ID NO: 2, a substitution of W782Q of SEQ ID NO: 2, a substitution of G791F, of SEQ ID NO: 2 a substitution of L792D of SEQ ID NO: 2, a substitution of L792K of SEQ ID NO: 2, a substitution of P793Q of SEQ ID NO: 2, a substitution of P793G of SEQ ID NO: 2, a substitution of Q804A of SEQ ID NO: 2, a substitution of Y966N of SEQ ID NO: 2, a substitution of Y723N of SEQ ID NO: 2, a substitution of Y857R of SEQ ID NO: 2, a substitution of S890R of SEQ ID NO: 2, a substitution of S932M of SEQ ID NO: 2, a substitution of L897M of SEQ ID NO: 2, a substitution of R624G of SEQ ID NO: 2, a substitution of S603G of SEQ ID NO: 2, a substitution of N737S of SEQ ID NO: 2, a substitution of L307K of SEQ ID NO: 2, a substitution of I658V of SEQ ID NO: 2, an insertion of PT at position 688 of SEQ ID NO: 2, an insertion of SA at position 794 of SEQ ID NO: 2, a substitution of S877R of SEQ ID NO: 2, a substitution of N580T of SEQ ID NO: 2, a substitution of V335G of SEQ ID NO: 2, a substitution of T620S of SEQ ID NO: 2, a substitution of W345G of SEQ ID NO: 2, a substitution of T280S of SEQ ID NO: 2, a substitution of L406P of SEQ ID NO: 2, a substitution of A612D of SEQ ID NO: 2, a substitution of A751S of SEQ ID NO: 2, a substitution of E386R of SEQ ID NO: 2, a substitution of V351M of SEQ ID NO: 2, a substitution of K210N of SEQ ID NO: 2, a substitution of D40A of SEQ ID NO: 2, a substitution of E773G of SEQ ID NO: 2, a substitution of H207L of SEQ ID NO: 2, a substitution of T62A SEQ ID NO: 2, a substitution of T287P of SEQ ID NO: 2, a substitution of T832A of SEQ ID NO: 2, a substitution of A893S of SEQ ID NO: 2, an insertion of V at position 14 of SEQ ID NO: 2, an insertion of AG at position 13 of SEQ ID NO: 2, a substitution of R11V of SEQ ID NO: 2, a substitution of R12N of SEQ ID NO: 2, a substitution of R13H of SEQ ID NO: 2, an insertion of Y at position 13 of SEQ ID NO: 2, a substitution of R12L of SEQ ID NO: 2, an insertion of Q at position 13 of SEQ ID NO: 2, an substitution of V15S of SEQ ID NO: 2, an insertion of D at position 17 of SEQ ID NO: 2 or a combination thereof.

[0247] In some embodiments, the CasX variant comprises at least one modification in the NTSB domain.

[0248] In some embodiments, the CasX variant comprises at least one modification in the TSL domain. In some embodiments, the at least one modification in the TSL domain comprises an amino acid substitution of one or more of amino acids Y857, S890, or S932 of SEQ ID NO: 2.

[0249] In some embodiments, the CasX variant comprises at least one modification in the helical I domain. In some embodiments, the at least one modification in the helical I domain comprises an amino acid substitution of one or more of amino acids S219, L249, E259, Q252, E292, L307, or D318 of SEQ ID NO: 2.

[0250] In some embodiments, the CasX variant comprises at least one modification in the helical II domain. In some embodiments, the at least one modification in the helical II domain comprises an amino acid substitution of one or more of amino acids D361, L379, E385, E386, D387, F399, L404, R458, C477, or D489 of SEQ ID NO: 2.

[0251] In some embodiments, the CasX variant comprises at least one modification in the OBD domain. In some embodiments, the at least one modification in the OBD comprises an amino acid substitution of one or more of amino acids F536, E552, T620, or 1658 of SEQ ID NO: 2.

[0252] In some embodiments, the CasX variant comprises at least one modification in the RuvC DNA cleavage domain. In some embodiments, the at least one modification in the RuvC DNA cleavage domain comprises an amino acid substitution of one or more of amino acids K682, G695, A708, V711, D732, A739, D733, L742, V747, F755, M771, M779, W782, A788, G791, L792, P793, Y797, M799, Q804, S819, or Y857 or a deletion of amino acid P793 of SEQ ID NO: 2.

[0253] In some embodiments, the CasX variant comprises at least one modification compared to the reference CasX sequence of SEQ ID NO: 2 is selected from one or more of: (a) an amino acid substitution of L379R; (b) an amino acid substitution of A708K; (c) an amino acid substitution of T620P; (d) an amino acid substitution of E385P; (e) an amino acid substitution of Y857R; (f) an amino acid substitution of I658V; (g) an amino acid substitution of F399L; (h) an amino acid substitution of Q252K; (i) an amino acid substitution of L404K; and (j) an amino acid deletion of P793.

[0254] In some embodiments, a CasX variant protein comprises at least two amino acid changes to a reference CasX protein amino acid sequence. The at least two amino acid changes can be substitutions, insertions, or deletions of a reference CasX protein amino acid sequence, or any combination thereof. The substitutions, insertions or deletions can be any substitution, insertion or deletion in the sequence of a reference CasX protein described herein. In some embodiments, the changes are contiguous, non-contiguous, or a combination of contiguous and non-contiguous amino acid changes to a reference CasX protein sequence. In some embodiments, the reference CasX protein is SEQ ID NO: 2. In some embodiments, a CasX variant protein comprises at least 2, at least 3, at least 4, at least 5, at least 6, at least 7, at least 8, at least 9, at least 10, at least 11, at least 12, at least 13, at least 14, at least 15, at least 16, at least 17, at least 18, at least 19, at least 20, at least 21, at least 22, at least 23, at least 24, at least 25, at least 30, at least 40, at least 45, at least 50, at least 55, at least 60, at least 65, at least 70, at least 75, at least 80, at least 85, at least 90, at least 95 or at least 100 amino acid changes to a reference CasX protein sequence. In some embodiments, a CasX variant protein comprises 1-50, 3-40, 5-30, 5-20, 5-15, 5-10, 10-50, 10-40, 10-30, 10-20, 15-50, 15-40, 15-30, 2-25, 2-24, 2-22, 2-23,2-22,2-21,2-20,2-19,2-18,2-17,2-16,2-15,2-14,2-12,2-11,2-10, 2-9, 2-8, 2-7, 2-6, 2-5, 2-4, 2-3, 3-25, 3-24, 3-22, 3-23, 3-22, 3-21, 3-20, 3-19, 3-18, 3-17, 3-16, 3-15, 3-14, 3-12, 3-11, 3-10, 3-9, 3-8, 3-7, 3-6, 3-5, 3-4,4-25,4-24,4-22,4-23,4-22,4-21,4-20,4-19, 4-18, 4-17, 4-16, 4-15, 4-14, 4-12, 4-11, 4-10, 4-9, 4-8, 4-7, 4-6, 4-5, 5-25, 5-24, 5-22, 5-23, 5-22, 5-21, 5-20, 5-19, 5-18, 5-17, 5-16, 5-15, 5-14, 5-12, 5-11, 5-10, 5-9, 5-8, 5-7 or 5-6 amino acid changes to a reference CasX protein sequence. In some embodiments, a CasX variant protein comprises 15-20 changes to a reference CasX protein sequence. In some embodiments, a CasX variant protein comprises 1, 2, 3, 4, 5, 6, 7, 8, 9, 10, 11, 12, 13, 14, 15, 16, 17, 18, 19, 20, 21, 22, 23, 24, 25, 26, 27, 28, 29 or 30 amino acid changes to a reference CasX protein sequence. In some embodiments, the at least two amino acid changes to the sequence of a reference CasX variant protein are selected from the group consisting of: a substitution of Y789T of SEQ ID NO: 2, a deletion of P793 of SEQ ID NO: 2, a substitution of Y789D of SEQ ID NO: 2, a substitution of T72S of SEQ ID NO: 2, a substitution of I546V of SEQ ID NO: 2, a substitution of E552A of SEQ ID NO: 2, a substitution of A636D of SEQ ID NO: 2, a substitution of F536S of SEQ ID NO:2, a substitution of A708K of SEQ ID NO: 2, a substitution of Y797L of SEQ ID NO: 2, a substitution of L792G SEQ ID NO: 2, a substitution of A739V of SEQ ID NO: 2, a substitution of G791M of SEQ ID NO: 2, an insertion of A at position 661 of SEQ ID NO: 2, a substitution of A788W of SEQ ID NO: 2, a substitution of K390R of SEQ ID NO: 2, a substitution of A751S of SEQ ID NO: 2, a substitution of E385A of SEQ ID NO: 2, an insertion of P at position 696 of SEQ ID NO: 2, an insertion of M at position 773 of SEQ ID NO: 2, a substitution of G695H of SEQ ID NO: 2, an insertion of AS at position 793 of SEQ ID NO: 2, an insertion of AS at position 795 of SEQ ID NO: 2, a substitution of C477R of SEQ ID NO: 2, a substitution of C477K of SEQ ID NO: 2, a substitution of C479A of SEQ ID NO: 2, a substitution of C479L of SEQ ID NO: 2, a substitution of I55F of SEQ ID NO: 2, a substitution of K210R of SEQ ID NO: 2, a substitution of C233S of SEQ ID NO: 2, a substitution of D231N of SEQ ID NO: 2, a substitution of Q338E of SEQ ID NO: 2, a substitution of Q338R of SEQ ID NO: 2, a substitution of L379R of SEQ ID NO: 2, a substitution of K390R of SEQ ID NO: 2, a substitution of L481Q of SEQ ID NO: 2, a substitution of F495S of SEQ ID NO:2, a substitution of D600N of SEQ ID NO: 2, a substitution of T886K of SEQ ID NO: 2, a substitution of A739V of SEQ ID NO: 2, a substitution of K460N of SEQ ID NO: 2, a substitution of I199F of SEQ ID NO: 2, a substitution of G492P of SEQ ID NO: 2, a substitution of T153I of SEQ ID NO: 2, a substitution of R591I of SEQ ID NO: 2, an insertion of AS at position 795 of SEQ ID NO: 2, an insertion of AS at position 796 of SEQ ID NO:2, an insertion of L at position 889 of SEQ ID NO: 2, a substitution of E121D of SEQ ID NO: 2, a substitution of S270W of SEQ ID NO: 2, a substitution of E712Q of SEQ ID NO: 2, a substitution of K942Q of SEQ ID NO: 2, a substitution of E552K of SEQ ID NO:2, a substitution of K25Q of SEQ ID NO: 2, a substitution of N47D of SEQ ID NO: 2, an insertion of T at position 696 of SEQ ID NO: 2, a substitution of L685I of SEQ ID NO: 2, a substitution of N880D of SEQ ID NO: 2, a substitution of Q102R of SEQ ID NO: 2, a substitution of M734K of SEQ ID NO: 2, a substitution of A724S of SEQ ID NO: 2, a substitution of T704K of SEQ ID NO: 2, a substitution of P224K of SEQ ID NO: 2, a substitution of K25R of SEQ ID NO: 2, a substitution of M29E of SEQ ID NO: 2, a substitution of H152D of SEQ ID NO: 2, a substitution of S219R of SEQ ID NO: 2, a substitution of E475K of SEQ ID NO: 2, a substitution of G226R of SEQ ID NO: 2, a substitution of A377K of SEQ ID NO: 2, a substitution of E480K of SEQ ID NO: 2, a substitution of K416E of SEQ ID NO: 2, a substitution of H164R of SEQ ID NO: 2, a substitution of K767R of SEQ ID NO: 2, a substitution of I7F of SEQ ID NO: 2, a substitution of M29R of SEQ ID NO: 2, a substitution of H435R of SEQ ID NO: 2, a substitution of E385Q of SEQ ID NO: 2, a substitution of E385K of SEQ ID NO: 2, a substitution of I279F of SEQ ID NO: 2, a substitution of D489S of SEQ ID NO: 2, a substitution of D732N of SEQ ID NO: 2, a substitution of A739T of SEQ ID NO: 2, a substitution of W885R of SEQ ID NO: 2, a substitution of E53K of SEQ ID NO: 2, a substitution of A238T of SEQ ID NO: 2, a substitution of P283Q of SEQ ID NO: 2, a substitution of E292K of SEQ ID NO: 2, a substitution of Q628E of SEQ ID NO: 2, a substitution of R388Q of SEQ ID NO: 2, a substitution of G791M of SEQ ID NO: 2, a substitution of L792K of SEQ ID NO: 2, a substitution of L792E of SEQ ID NO: 2, a substitution of M779N of SEQ ID NO: 2, a substitution of G27D of SEQ ID NO: 2, a substitution of K955R of SEQ ID NO: 2, a substitution of S867R of SEQ ID NO: 2, a substitution of R693I of SEQ ID NO: 2, a substitution of F189Y of SEQ ID NO: 2, a substitution of V635M of SEQ ID NO: 2, a substitution of F399L of SEQ ID NO: 2, a substitution of E498K of SEQ ID NO: 2, a substitution of E386R of SEQ ID NO: 2, a substitution of V254G of SEQ ID NO: 2, a substitution of P793S of SEQ ID NO: 2, a substitution of K188E of SEQ ID NO: 2, a substitution of QT945KI of SEQ ID NO: 2, a substitution of T620P of SEQ ID NO: 2, a substitution of T946P of SEQ ID NO: 2, a substitution of TT949PP of SEQ ID NO: 2, a substitution of N952T of SEQ ID NO: 2, a substitution of K682E of SEQ ID NO: 2, a substitution of K975R of SEQ ID NO: 2, a substitution of L212P of SEQ ID NO: 2, a substitution of E292R of SEQ ID NO: 2, a substitution of I303K of SEQ ID NO: 2, a substitution of C349E of SEQ ID NO: 2, a substitution of E385P of SEQ ID NO: 2, a substitution of E386N of SEQ ID NO: 2, a substitution of D387K of SEQ ID NO: 2, a substitution of L404K of SEQ ID NO: 2, a substitution of E466H of SEQ ID NO: 2, a substitution of C477Q of SEQ ID NO: 2, a substitution of C477H of SEQ ID NO: 2, a substitution of C479A of SEQ ID NO: 2, a substitution of D659H of SEQ ID NO: 2, a substitution of T806V of SEQ ID NO: 2, a substitution of K808S of SEQ ID NO: 2, an insertion of AS at position 797 of SEQ ID NO: 2, a substitution of V959M of SEQ ID NO: 2, a substitution of K975Q of SEQ ID NO: 2, a substitution of W974G of SEQ ID NO: 2, a substitution of A708Q of SEQ ID NO: 2, a substitution of V711K of SEQ ID NO: 2, a substitution of D733T of SEQ ID NO: 2, a substitution of L742W of SEQ ID NO: 2, a substitution of V747K of SEQ ID NO: 2, a substitution of F755M of SEQ ID NO: 2, a substitution of M771A of SEQ ID NO: 2, a substitution of M771Q of SEQ ID NO: 2, a substitution of W782Q of SEQ ID NO: 2, a substitution of G791F, of SEQ ID NO: 2 a substitution of L792D of SEQ ID NO: 2, a substitution of L792K of SEQ ID NO: 2, a substitution of P793Q of SEQ ID NO: 2, a substitution of P793G of SEQ ID NO: 2, a substitution of Q804A of SEQ ID NO: 2, a substitution of Y966N of SEQ ID NO: 2, a substitution of Y723N of SEQ ID NO: 2, a substitution of Y857R of SEQ ID NO: 2, a substitution of S890R of SEQ ID NO: 2, a substitution of S932M of SEQ ID NO: 2, a substitution of L897M of SEQ ID NO: 2, a substitution of R624G of SEQ ID NO: 2, a substitution of S603G of SEQ ID NO: 2, a substitution of N737S of SEQ ID NO: 2, a substitution of L307K of SEQ ID NO: 2, a substitution of I658V of SEQ ID NO: 2, an insertion of PT at position 688 of SEQ ID NO: 2, an insertion of SA at position 794 of SEQ ID NO: 2, a substitution of S877R of SEQ ID NO: 2, a substitution of N580T of SEQ ID NO: 2, a substitution of V335G of SEQ ID NO: 2, a substitution of T620S of SEQ ID NO: 2, a substitution of W345G of SEQ ID NO: 2, a substitution of T280S of SEQ ID NO: 2, a substitution of L406P of SEQ ID NO: 2, a substitution of A612D of SEQ ID NO: 2, a substitution of A751S of SEQ ID NO: 2, a substitution of E386R of SEQ ID NO: 2, a substitution of V351M of SEQ ID NO: 2, a substitution of K210N of SEQ ID NO: 2, a substitution of D40A of SEQ ID NO: 2, a substitution of E773G of SEQ ID NO: 2, a substitution of H207L of SEQ ID NO: 2, a substitution of T62A SEQ ID NO: 2, a substitution of T287P of SEQ ID NO: 2, a substitution of T832A of SEQ ID NO: 2, a substitution of A893S of SEQ ID NO: 2, an insertion of V at position 14 of SEQ ID NO: 2, an insertion of AG at position 13 of SEQ ID NO: 2, a substitution of R11V of SEQ ID NO: 2, a substitution of R12N of SEQ ID NO: 2, a substitution of R13H of SEQ ID NO: 2, an insertion of Y at position 13 of SEQ ID NO: 2, a substitution of R12L of SEQ ID NO: 2, an insertion of Q at position 13 of SEQ ID NO: 2, an substitution of V15S of SEQ ID NO: 2 and an insertion of D at position 17 of SEQ ID NO: 2. In some embodiments, the at least two amino acid changes to a reference CasX protein are selected from the amino acid changes disclosed in the sequences of Table 4. In some embodiments, a CasX variant comprises any combination of the foregoing embodiments of this paragraph.

[0255] In some embodiments, a CasX variant protein comprises more than one substitution, insertion and/or deletion of a reference CasX protein amino acid sequence. In some embodiments, the reference CasX protein comprises or consists essentially of SEQ ID NO: 2. In some embodiments, a CasX variant protein comprises a substitution of S794R and a substitution of Y797L of SEQ ID NO: 2. In some embodiments, a CasX variant protein comprises a substitution of K416E and a substitution of A708K of SEQ ID NO: 2. In some embodiments, a CasX variant protein comprises a substitution of A708K and a deletion of P793 of SEQ ID NO: 2. In some embodiments, a CasX variant protein comprises a deletion of P793 and an insertion of AS at position 795 SEQ ID NO: 2. In some embodiments, a CasX variant protein comprises a substitution of Q367K and a substitution of I425S of SEQ ID NO: 2. In some embodiments, a CasX variant protein comprises a substitution of A708K, a deletion of P position 793 and a substitution A793V of SEQ ID NO: 2. In some embodiments, a CasX variant protein comprises a substitution of Q338R and a substitution of A339E of SEQ ID NO: 2. In some embodiments, a CasX variant protein comprises a substitution of Q338R and a substitution of A339K of SEQ ID NO: 2. In some embodiments, a CasX variant protein comprises a substitution of S507G and a substitution of G508R of SEQ ID NO: 2. In some embodiments, a CasX variant protein comprises a substitution of L379R, a substitution of A708K and a deletion of P at position 793 of SEQ ID NO: 2. In some embodiments, a CasX variant protein comprises a substitution of C477K, a substitution of A708K and a deletion of P at position 793 of SEQ ID NO: 2. In some embodiments, a CasX variant protein comprises a substitution of L379R, a substitution of C477K, a substitution of A708K and a deletion of P at position of 793 of SEQ ID NO: 2. In some embodiments, a CasX variant protein comprises a substitution of L379R, a substitution of A708K, a deletion of P at position 793 and a substitution A739V of SEQ ID NO: 2. In some embodiments, a CasX variant protein comprises a substitution of C477K, a substitution of A708K, a deletion of P at position 793 and a substitution of A739V of SEQ ID NO: 2. In some embodiments, a CasX variant protein comprises a substitution of L379R, a substitution of C477K, a substitution of A708K, a deletion of P at position 793 and a substitution of A739V of SEQ ID NO: 2. In some embodiments, a CasX variant protein comprises a substitution of L379R, a substitution of A708K, a deletion of P at position 793 and a substitution of M779N of SEQ ID NO: 2. In some embodiments, a CasX variant protein comprises a substitution of L379R, a substitution of A708K, a deletion of P at position 793 and a substitution of M77iN of SEQ ID NO: 2. In some embodiments, a CasX variant protein comprises a substitution of L379R, a substitution of 708K, a deletion of P at position 793 and a substitution of D489S of SEQ ID NO: 2. In some embodiments, a CasX variant protein comprises a substitution of L379R, a substitution of A708K, a deletion of P at position 793 and a substitution of A739T of SEQ ID NO: 2. In some embodiments, a CasX variant protein comprises a substitution of L379R, a substitution of A708K, a deletion of P at position 793 and a substitution of D732N of SEQ ID NO: 2. In some embodiments, a CasX variant protein comprises a substitution of L379R, a substitution of A708K, a deletion of P at position 793 and a substitution of G791M of SEQ ID NO: 2. In some embodiments, a CasX variant protein comprises a substitution of L379R, a substitution of 708K, a deletion of P at position 793 and a substitution of Y797L of SEQ ID NO: 2. In some embodiments, a CasX variant protein comprises a substitution of L379R, a substitution of C477K, a substitution of A708K, a deletion of P at position 793 and a substitution of M779N of SEQ ID NO: 2. In some embodiments, a CasX variant protein comprises a substitution of L379R, a substitution of C477K, a substitution of A708K, a deletion of P at position 793 and a substitution of M771N of SEQ ID NO: 2. In some embodiments, a CasX variant protein comprises a substitution of L379R, a substitution of C477K, a substitution of A708K, a deletion of P at position 793 and a substitution of D489S of SEQ ID NO: 2. In some embodiments, a CasX variant protein comprises a substitution of L379R, a substitution of C477K, a substitution of A708K, a deletion of P at position 793 and a substitution of A739T of SEQ ID NO: 2. In some embodiments, a CasX variant protein comprises a substitution of L379R, a substitution of C477K, a substitution of A708K, a deletion of P at position 793 and a substitution of D732N of SEQ ID NO: 2. In some embodiments, a CasX variant protein comprises a substitution of L379R, a substitution of C477K, a substitution of A708K, a deletion of P at position 793 and a substitution of G791M of SEQ ID NO: 2. In some embodiments, a CasX variant protein comprises a substitution of L379R, a substitution of C477K, a substitution of A708K, a deletion of P at position 793 and a substitution of Y797L of SEQ ID NO: 2. In some embodiments, a CasX variant protein comprises a substitution of L379R, a substitution of C477K, a substitution of A708K, a deletion of P at position 793 and a substitution of T620P of SEQ ID NO: 2. In some embodiments, a CasX variant protein comprises a substitution of A708K, a deletion of P at position 793 and a substitution of E386S of SEQ ID NO: 2. In some embodiments, a CasX variant protein comprises a substitution of E386R, a substitution of F399L and a deletion of P at position 793 of SEQ ID NO: 2. In some embodiments, a CasX variant protein comprises a substitution of R581I and A739V of SEQ ID NO: 2. In some embodiments, a CasX variant comprises any combination of the foregoing embodiments of this paragraph.

[0256] In some embodiments, a CasX variant protein comprises more than one substitution, insertion and/or deletion of a reference CasX protein amino acid sequence. In some embodiments, a CasX variant protein comprises a substitution of A708K, a deletion of P at position 793 and a substitution of A739V of SEQ ID NO: 2. In some embodiments, a CasX variant protein comprises a substitution of L379R, a substitution of A708K and a deletion of P at position 793 of SEQ ID NO: 2. In some embodiments, a CasX variant protein comprises a substitution of C477K, a substitution of A708K and a deletion of P at position 793 of SEQ ID NO: 2. In some embodiments, a CasX variant protein comprises a substitution of L379R, a substitution of C477K, a substitution of A708K and a deletion of P at position 793 of SEQ ID NO: 2. In some embodiments, a CasX variant protein comprises a substitution of L379R, a substitution of A708K, a deletion of P at position 793 and a substitution of A739V of SEQ ID NO: 2. In some embodiments, a CasX variant protein comprises a substitution of C477K, a substitution of A708K, a deletion of P at position 793 and a substitution of A739 of SEQ ID NO: 2. In some embodiments, a CasX variant protein comprises a substitution of L379R, a substitution of C477K, a substitution of A708K, a deletion of P at position 793 and a substitution of A739V of SEQ ID NO: 2. In some embodiments, a CasX variant protein comprises a substitution of L379R, a substitution of C477K, a substitution of A708K, a deletion of P at position 793 and a substitution of T620P of SEQ ID NO: 2. In some embodiments, a CasX variant protein comprises a substitution of M771A of SEQ ID NO: 2. In some embodiments, a CasX variant protein comprises a substitution of L379R, a substitution of A708K, a deletion of P at position 793 and a substitution of D732N of SEQ ID NO: 2. In some embodiments, a CasX variant comprises any combination of the foregoing embodiments of this paragraph.

[0257] In some embodiments, a CasX variant protein comprises a substitution of W782Q of SEQ ID NO: 2. In some embodiments, a CasX variant protein comprises a substitution of M771Q of SEQ ID NO: 2. In some embodiments, a CasX variant protein comprises a substitution of R458I and a substitution of A739V of SEQ ID NO: 2. In some embodiments, a CasX variant protein comprises a substitution of L379R, a substitution of A708K, a deletion of P at position 793 and a substitution of M77iN of SEQ ID NO: 2. In some embodiments, a CasX variant protein comprises a substitution of L379R, a substitution of A708K, a deletion of P at position 793 and a substitution of A739T of SEQ ID NO: 2. In some embodiments, a CasX variant protein comprises a substitution of L379R, a substitution of C477K, a substitution of A708K, a deletion of P at position 793 and a substitution of D489S of SEQ ID NO: 2. In some embodiments, a CasX variant protein comprises a substitution of L379R, a substitution of C477K, a substitution of A708K, a deletion of P at position 793 and a substitution of D732N of SEQ ID NO: 2. In some embodiments, a CasX variant protein comprises a substitution of V711K of SEQ ID NO: 2. In some embodiments, a CasX variant protein comprises a substitution of L379R, a substitution of C477K, a substitution of A708K, a deletion of P at position 793 and a substitution of Y797L of SEQ ID NO: 2. In some embodiments, a CasX variant protein comprises a substitution of L379R, a substitution of A708K and a deletion of P at position 793 of SEQ ID NO: 2. In some embodiments, a CasX variant protein comprises a substitution of L379R, a substitution of C477K, a substitution of A708K, a deletion of P at position 793 and a substitution of M77iN of SEQ ID NO: 2. In some embodiments, a CasX variant protein comprises a substitution of A708K, a substitution of P at position 793 and a substitution of E386S of SEQ ID NO: 2. In some embodiments, a CasX variant protein comprises a substitution of L379R, a substitution of C477K, a substitution of A708K and a deletion of P at position 793 of SEQ ID NO: 2. In some embodiments, a CasX variant protein comprises a substitution of L792D of SEQ ID NO: 2. In some embodiments, a CasX variant protein comprises a substitution of G791F of SEQ ID NO: 2. In some embodiments, a CasX variant protein comprises a substitution of A708K, a deletion of P at position 793 and a substitution of A739V of SEQ ID NO: 2. In some embodiments, a CasX variant protein comprises a substitution of L379R, a substitution of A708K, a deletion of P at position 793 and a substitution of A739V of SEQ ID NO: 2. In some embodiments, a CasX variant protein comprises a substitution of C477K, a substitution of A708K and a substitution of P at position 793 of SEQ ID NO: 2. In some embodiments, a CasX variant protein comprises a substitution of L249I and a substitution of M771N of SEQ ID NO: 2. In some embodiments, a CasX variant protein comprises a substitution of V747K of SEQ ID NO: 2. In some embodiments, a CasX variant protein comprises a substitution of L379R, a substitution of C477, a substitution of A708K, a deletion of P at position 793 and a substitution of M779N of SEQ ID NO: 2. In some embodiments, a CasX variant protein comprises a substitution of F755M. In some embodiments, a CasX variant comprises any combination of the foregoing embodiments of this paragraph.

[0258] In some embodiments, a CasX variant protein comprises at least one modification compared to the reference CasX sequence of SEQ ID NO: 2, wherein the at least one modification is selected from one or more of: an amino acid substitution of L379R; an amino acid substitution of A708K; an amino acid substitution of T620P; an amino acid substitution of E385P; an amino acid substitution of Y857R; an amino acid substitution of I658V; an amino acid substitution of F399L; an amino acid substitution of Q252K; and an amino acid deletion of [P793]. In some embodiments, a CasX variant protein comprises at least one modification compared to the reference CasX sequence of SEQ ID NO: 2, wherein the at least one modification is selected from one or more of: an amino acid substitution of L379R; an amino acid substitution of A708K; an amino acid substitution of T620P; an amino acid substitution of E385P; an amino acid substitution of Y857R; an amino acid substitution of I658V; an amino acid substitution of F399L; an amino acid substitution of Q252K; an amino acid substitution of L404K; and an amino acid deletion of [P793]. In other embodiments, a CasX variant protein comprises any combination of the foregoing substitutions or deletions compared to the reference CasX sequence of SEQ ID NO: 2. In other embodiments, the CasX variant protein can, in addition to the foregoing substitutions or deletions, further comprise a substitution of an NTSB and/or a helical 1b domain from the reference CasX of SEQ ID NO: 1.

[0259] In some embodiments, the CasX variant protein comprises between 400 and 2000 amino acids, between 500 and 1500 amino acids, between 700 and 1200 amino acids, between 800 and 1100 amino acids, or between 900 and 1000 amino acids.

[0260] In some embodiments, the CasX variant protein comprises one or more modifications in a region of non-contiguous residues that form a channel in which gNA:target DNA complexing occurs. In some embodiments, the CasX variant protein comprises one or more modifications comprising a region of non-contiguous residues that form an interface which binds with the gNA. For example, in some embodiments of a reference CasX protein, the helical I, helical II and OBD domains all contact or are in proximity to the gNA:target DNA complex, and one or more modifications to non-contiguous residues within any of these domains may improve function of the CasX variant protein.

[0261] In some embodiments, the CasX variant protein comprises one or more modifications in a region of non-contiguous residues that form a channel which binds with the non-target strand DNA. For example, a CasX variant protein can comprise one or more modifications to non-contiguous residues of the NTSBD. In some embodiments, the CasX variant protein comprises one or more modifications in a region of non-contiguous residues that form an interface which binds with the PAM. For example, a CasX variant protein can comprise one or more modifications to non-contiguous residues of the helical I domain or OBD. In some embodiments, the CasX variant protein comprises one or more modifications comprising a region of non-contiguous surface-exposed residues. As used herein, “surface-exposed residues” refers to amino acids on the surface of the CasX protein, or amino acids in which at least a portion of the amino acid, such as the backbone or a part of the side chain is on the surface of the protein. Surface exposed residues of cellular proteins such as CasX, which are exposed to an aqueous intracellular environment, are frequently selected from positively charged hydrophilic amino acids, for example arginine, asparagine, aspartate, glutamine, glutamate, histidine, lysine, serine, and threonine. Thus, for example, in some embodiments of the variants provided herein, a region of surface exposed residues comprises one or more insertions, deletions, or substitutions compared to a reference CasX protein. In some embodiments, one or more positively charged residues are substituted for one or more other positively charged residues, or negatively charged residues, or uncharged residues, or any combinations thereof. In some embodiments, one or more amino acids residues for substitution are near bound nucleic acid, for example residues in the RuvC domain or helical I domain that contact target DNA, or residues in the OBD or helical II domain that bind the gNA, can be substituted for one or more positively charged or polar amino acids.

[0262] In some embodiments, the CasX variant protein comprises one or more modifications in a region of non-contiguous residues that form a core through hydrophobic packing in a domain of the reference CasX protein. Without wishing to be bound by any theory, regions that form cores through hydrophobic packing are rich in hydrophobic amino acids such as valine, isoleucine, leucine, methionine, phenylalanine, tryptophan, and cysteine. For example, in some reference CasX proteins, RuvC domains comprise a hydrophobic pocket adjacent to the active site. In some embodiments, between 2 to 15 residues of the region are charged, polar, or base-stacking. Charged amino acids (sometimes referred to herein as residues) may include, for example, arginine, lysine, aspartic acid, and glutamic acid, and the side chains of these amino acids may form salt bridges provided a bridge partner is also present. Polar amino acids may include, for example, glutamine, asparagine, histidine, serine, threonine, tyrosine, and cysteine. Polar amino acids can, in some embodiments, form hydrogen bonds as proton donors or acceptors, depending on the identity of their side chains. As used herein, “base-stacking” includes the interaction of aromatic side chains of an amino acid residue (such as tryptophan, tyrosine, phenylalanine, or histidine) with stacked nucleotide bases in a nucleic acid. Any modification to a region of non-contiguous amino acids that are in close spatial proximity to form a functional part of the CasX variant protein is envisaged as within the scope of the disclosure.

[0263] i. CasX Variant Proteins with Domains from Multiple Source Proteins

[0264] In certain embodiments, the disclosure provides a chimeric CasX protein comprising protein domains from two or more different CasX proteins, such as two or more reference CasX proteins, or two or more CasX variant protein sequences as described herein. As used herein, a “chimeric CasX protein” refers to a CasX containing at least two domains isolated or derived from different sources, such as two naturally occurring proteins, which may, in some embodiments, be isolated from different species. For example, in some embodiments, a chimeric CasX protein comprises a first domain from a first CasX protein and a second domain from a second, different CasX protein. In some embodiments, the first domain can be selected from the group consisting of the NTSB, TSL, Helical I, Helical II, OBD and RuvC domains. In some embodiments, the second domain is selected from the group consisting of the NTSB, TSL, Helical I, Helical II, OBD and RuvC domains with the second domain being different from the foregoing first domain. For example, a chimeric CasX protein may comprise an NTSB, TSL, Helical I, Helical II, OBD domains from a CasX protein of SEQ ID NO: 2, and a RuvC domain from a CasX protein of SEQ ID NO: 1, or vice versa. As a further example, a chimeric CasX protein may comprise an NTSB, TSL, Helical II, OBD and RuvC domain from CasX protein of SEQ ID NO: 2, and a Helical I domain from a CasX protein of SEQ ID NO: 1, or vice versa. Thus, in certain embodiments, a chimeric CasX protein may comprise an NTSB, TSL, Helical II, OBD and RuvC domain from a first CasX protein, and a Helical I domain from a second CasX protein. In some embodiments of the chimeric CasX proteins, the domains of the first CasX protein are derived from the sequences of SEQ ID NO: 1, SEQ ID NO: 2 or SEQ ID NO: 3, and the domains of the second CasX protein are derived from the sequences of SEQ ID NO: 1, SEQ ID NO: 2 or SEQ ID NO: 3, and the first and second CasX proteins are not the same. In some embodiments, domains of the first CasX protein comprise sequences derived from SEQ ID NO: 1 and domains of the second CasX protein comprise sequences derived from SEQ ID NO: 2. In some embodiments, domains of the first CasX protein comprise sequences derived from SEQ ID NO: 1 and domains of the second CasX protein comprise sequences derived from SEQ ID NO: 3. In some embodiments, domains of the first CasX protein comprise sequences derived from SEQ ID NO: 2 and domains of the second CasX protein comprise sequences derived from SEQ ID NO: 3. In some embodiments, the CasX variant is selected of group consisting of CasX variants 387, 388, 389, 390, 395, 485, 486, 487, 488, 489, 490, and 491, the sequences of which are set forth in Table 4.

[0265] In some embodiments, a CasX variant protein comprises at least one chimeric domain comprising a first part from a first CasX protein and a second part from a second, different CasX protein. As used herein, a “chimeric domain” refers to a domain containing at least two parts isolated or derived from different sources, such as two naturally occurring proteins or portions of domains from two reference CasX proteins. The at least one chimeric domain can be any of the NTSB, TSL, helical I, helical II, OBD or RuvC domains as described herein. In some embodiments, the first portion of a CasX domain comprises a sequence of SEQ ID NO: 1 and the second portion of a CasX domain comprises a sequence of SEQ ID NO: 2. In some embodiments, the first portion of the CasX domain comprises a sequence of SEQ ID NO: 1 and the second portion of the CasX domain comprises a sequence of SEQ ID NO: 3. In some embodiments, the first portion of the CasX domain comprises a sequence of SEQ ID NO: 2 and the second portion of the CasX domain comprises a sequence of SEQ ID NO: 3. In some embodiments, the at least one chimeric domain comprises a chimeric RuvC domain. As an example of the foregoing, the chimeric RuvC domain comprises amino acids 661 to 824 of SEQ ID NO: 1 and amino acids 922 to 978 of SEQ ID NO: 2. As an alternative example of the foregoing, a chimeric RuvC domain comprises amino acids 648 to 812 of SEQ ID NO: 2 and amino acids 935 to 986 of SEQ ID NO: 1. In some embodiments, a CasX protein comprises a first domain from a first CasX protein and a second domain from a second CasX protein, and at least one chimeric domain comprising at least two parts isolated from different CasX proteins using the approach of the embodiments described in this paragraph. In the foregoing embodiments, the chimeric CasX proteins having domains or portions of domains derived from SEQ ID NOS: 1, 2 and 3, can further comprise amino acid insertions, deletions, or substitutions of any of the embodiments disclosed herein.

[0266] In some embodiments, a CasX variant protein comprises a sequence set forth in Tables 4, 6, 7, 8, or 10. In some embodiments, a CasX variant protein consists of a sequence set forth in Table 4. In other embodiments, a CasX variant protein comprises a sequence at least 60% identical, at least 65% identical, at least 70% identical, at least 75% identical, at least 80% identical, at least 81% identical, at least 82% identical, at least 83% identical, at least 84% identical, at least 85% identical, at least 86% identical, at least 86% identical, at least 87% identical, at least 88% identical, at least 89% identical, at least 89% identical, at least 90% identical, at least 91% identical, at least 92% identical, at least 93% identical, at least 94% identical, at least 95% identical, at least 96% identical, at least 97% identical, at least 98% identical, at least 99% identical, at least 99.5% identical to a sequence set forth in Tables 4, 6, 7, 8, or 10. In other embodiments, a CasX variant protein comprises a sequence set forth in Table 4, and further comprises one or more NLS disclosed herein at or near either the N-terminus, the C-terminus, or both. It will be understood that in some cases, the N-terminal methionine of the CasX variants of the Tables is removed from the expressed CasX variant during post-translational modification.

TABLE 4
CasX Variant Sequences

| Description* | Amino Acid Sequence |
|---|---|
| TSL, Helical | MQEIKRINKIRRRLVKDSNTKKAGKTGPMKTLLVRVMTPDLRERLENLRKKPEN |
| I, Helical II, | IPQPISNTSRANLNKLLTDYTEMKKAILHVYWEEFQKDPVGLMSRVAQPASKKI |
| OBD and | DQNKLKPEMDEKGNLTTAGFACSQCGQPLFVYKLEQVSEKGKAYTNYFGRCNVA |
| RuvC | EHEKLILLAQLKPEKDSDEAVTYSLGKFGQRALDFYSIHVTRESNHPVKPLEQI |
| domains | GGNSCASGPVGKALSDACMGAVASFLTKYQDIILEHQKVIKKNEKRLANLKDIA |
| from SEQ ID | SANGLAFPKITLPPQPHTKEGIEAYNNVVAQIVIWVNLNLWQKLKIGRDEAKPL |
| NO: 2 and an | QRLKGFPSFPLVERQANEVDWWDMVCNVKKLINEKKEDGKVFWQNLAGYKRQEA |
| NTSB | LRPYLSSEEDRKKGKKFARYQFGDLLLHLEKKHGEDWGKVYDEAWERIDKKVEG |
| domain from | LSKHIKLEEERRSEDAQSKAALTDWLRAKASFVIEGLKEADKDEFCRCELKLQK |
| SEQ ID NO: | WYGDLRGKPFAIEAENSILDISGFSKQYNCAFIWQKDGVKKLNLYLIINYFKGG |
| 1 | KLRFKKIKPEAFEANRFYTVINKKSGEIVPMEVNFNFDDPNLIILPLAFGKRQG |
| | REFIWNDLLSLETGSLKLANGRVIEKTLYNRRTRQDEPALFVALTFERREVLDS |
| | SNIKPMNLIGIDRGENIPAVIALTDPEGCPLSRFKDSLGNPTHILRIGESYKEK |
| | QRTIQAKKEVEQRRAGGYSRKYASKAKNLADDMVRNTARDLLYYAVTQDAMLIF |
| | ENLSRGFGRQGKRTFMAERQYTRMEDWLTAKLAYEGLSKTYLSKTLAQYTSKTC |
| | SNCGFTITSADYDRVLEKLKKTATGWMTTINGKELKVEGQITYYNRYKRQNVVK |
| | DLSVELDRLSEESVNNDISSWTKGRSGEALSLLKKRFSHRPVQEKFVCLNCGFE |
| | THADEQAALNIARSWLFLRSQEYKKYQTNKTTGNTDKRAFVETWQSFYRKKLKE |
| | VWKPAV (SEQ ID NO: 36) |
| NTSB, | MQEIKRINKIRRRLVKDSNTKKAGKTGPMKTLLVRVMTPDLRERLENLRKKPEN |
| Helical I, | IPQPISNTSRANLNKLLTDYTEMKKAILHVYWEEFQKDPVGLMSRVAQPAPKNI |
| Helical II, | DQRKLIPVKDGNERLTSSGFACSQCCQPLYVYKLEQVNDKGKPHTNYFGRCNVS |
| OBD and | EHERLILLSPHKPEANDELVTYSLGKFGQRALDFYSIHVTRESNHPVKPLEQIG |
| RuvC | GNSCASGPVGKALSDACMGAVASFLTKYQDIILEHQKVIKKNEKRLANLKDIAS |
| domains | ANGLAFPKITLPPQPHTKEGIEAYNNVVAQIVIWVNLNLWQKLKIGRDEAKPLQ |
| from SEQ ID | RLKGFPSFPLVERQANEVDWWDMVCNVKKLINEKKEDGKVFWQNLAGYKRQEAL |
| NO: 2 and a | RPYLSSEEDRKKGKKFARYQFGDLLLHLEKKHGEDWGKVYDEAWERIDKKVEGL |
| TSL domain | SKHIKLEEERRSEDAQSKAALTDWLRAKASFVIEGLKEADKDEFCRCELKLQKW |
| from SEQ ID | YGDLRGKPFAIEAENSILDISGFSKQYNCAFIWQKDGVKKLNLYLIINYFKGGK |
| NO: 1. | LRFKKIKPEAFEANRFYTVINKKSGEIVPMEVNFNFDDPNLIILPLAFGKRQGR |
| | EFIWNDLLSLETGSLKLANGRVIEKTLYNRRTRQDEPALFVALTFERREVLDSS |
| | NIKPMNLIGIDRGENIPAVIALTDPEGCPLSRFKDSLGNPTHILRIGESYKEKQ |
| | RTIQAKKEVEQRRAGGYSRKYASKAKNLADDMVRNTARDLLYYAVTQDAMLIFE |
| | NLSRGFGRQGKRTFMAERQYTRMEDWLTAKLAYEGLSKTYLSKTLAQYTSKTCS |
| | NCGFTITTADYDGMLVRLKKTSDGWATTLNNKELKAEGQITYYNRYKRQTVEKE |
| | LSAELDRLSEESGNNDISKWTKGRRDEALFLLKKRFSHRPVQEQFVCLDCGHEV |
| | HADEQAALNIARSWLFLRSQEYKKYQTNKTTGNTDKRAFVETWQSFYRKKLKEV |
| | WKPAV (SEQ ID NO: 37) |
| TSL, Helical | MEKRINKIRKKLSADNATKPVSRSGPMKTLLVRVMTDDLKKRLEKRRKKPEVMP |
| I, Helical II, | QVISNNAANNLRMLLDDYTKMKEAILQVYWQEFKDDHVGLMCKFAQPAPKNIDQ |
| OBD and | RKLIPVKDGNERLTSSGFACSQCCQPLYVYKLEQVNDKGKPHTNYFGRCNVSEH |
| RuvC | ERLILLSPHKPEANDELVTYSLGKFGQRALDFYSIHVTKESTHPVKPLAQIAGN |
| domains | RYASGPVGKALSDACMGTIASFLSKYQDIIIEHQKVVKGNQKRLESLRELAGKE |
| from SEQ ID | NLEYPSVTLPPQPHTKEGVDAYNEVIARVRMWVNLNLWQKLKLSRDDAKPLLRL |
| NO: 1 and an | KGFPSFPVVERRENEVDWWNTINEVKKLIDAKRDMGRVFWSGVTAEKRNTILEG |
| NTSB | YNYLPNENDHKKREGSLENPKKPAKRQFGDLLLYLEKKYAGDWGKVFDEAWERI |
| domain from | DKKIAGLTSHIEREEARNAEDAQSKAVLTDWLRAKASFVLERLKEMDEKEFYAC |
| SEQ ID NO: | EIQLQKWYGDLRGNPFAVEAENRVVDISGFSIGSDGHSIQYRNLLAWKYLENGK |
| 2 | REFYLLMNYGKKGRIRFTDGTDIKKSGKWQGLLYGGGKAKVIDLTFDPDDEQLI |
| | ILPLAFGTRQGREFIWNDLLSLETGLIKLANGRVIEKTIYNKKIGRDEPALFVA |
| | LTFERREVVDPSNIKPVNLIGVDRGENIPAVIALTDPEGCPLPEFKDSSGGPTD |
| | ILRIGEGYKEKQRAIQAAKEVEQRRAGGYSRKFASKSRNLADDMVRNSARDLFY |
| | HAVTHDAVLVFENLSRGFGRQGKRTFMTERQYTKMEDWLTAKLAYEGLTSKTYL |
| | SKTLAQYTSKTCSNCGFTITTADYDGMLVRLKKTSDGWATTLNNKELKAEGQIT |
| | YYNRYKRQTVEKELSAELDRLSEESGNNDISKWTKGRRDEALFLLKKRFSHRPV |
| | QEQFVCLDCGHEVHADEQAALNIARSWLFLNSNSTEFKSYKSGKQPFVGAWQAF |
| | YKRRLKEVWKPNA (SEQ ID NO: 38) |
| NTSB, | MEKRINKIRKKLSADNATKPVSRSGPMKTLLVRVMTDDLKKRLEKRRKKPEVMP |
| Helical I, | QVISNNAANNLRMLLDDYTKMKEAILQVYWQEFKDDHVGLMCKFAQPASKKIDQ |
| Helical II, | NKLKPEMDEKGNLTTAGFACSQCGQPLFVYKLEQVSEKGKAYTNYFGRCNVAEH |
| OBD and | EKLILLAQLKPEKDSDEAVTYSLGKFGQRALDFYSIHVTKESTHPVKPLAQIAG |
| RuvC | NRYASGPVGKALSDACMGTIASFLSKYQDIIIEHQKVVKGNQKRLESLRELAGK |
| domains | ENLEYPSVTLPPQPHTKEGVDAYNEVIARVRMWVNLNLWQKLKLSRDDAKPLLR |
| from SEQ ID | LKGFPSFPVVERRENEVDWWNTINEVKKLIDAKRDMGRVFWSGVTAEKRNTILE |
| NO: 1 and an | GYNYLPNENDHKKREGSLENPKKPAKRQFGDLLLYLEKKYAGDWGKVFDEAWER |
| TSL domain | IDKKIAGLTSHIEREEARNAEDAQSKAVLTDWLRAKASFVLERLKEMDEKEFYA |
| from SEQ ID | CEIQLQKWYGDLRGNPFAVEAENRVVDISGFSIGSDGHSIQYRNLLAWKYLENG |
| NO: 2. | KREFYLLMNYGKKGRIRFTDGTDIKKSGKWQGLLYGGGKAKVIDLTFDPDDEQL |
| | IILPLAFGTRQGREFIWNDLLSLETGLIKLANGRVIEKTIYNKKIGRDEPALFV |
| | ALTFERREVVDPSNIKPVNLIGVDRGENIPAVIALTDPEGCPLPEFKDSSGGPT |
| | DILRIGEGYKEKQRAIQAAKEVEQRRAGGYSRKFASKSRNLADDMVRNSARDLF |
| | YHAVTHDAVLVFENLSRGFGRQGKRTFMTERQYTKMEDWLTAKLAYEGLTSKTY |
| | LSKTLAQYTSKTCSNCGFTITSADYDRVLEKLKKTATGWMTTINGKELKVEGQI |
| | TYYNRYKRQNVVKDLSVELDRLSEESVNNDISSWTKGRSGEALSLLKKRFSHRP |
| | VQEKFVCLNCGFETHADEQAALNIARSWLFLNSNSTEFKSYKSGKQPFVGAWQA |
| | FYKRRLKEVWKPNA (SEQ ID NO: 39) |
| NTSB, TSL, | MQEIKRINKIRRRLVKDSNIKKAGKTGPMKTLLVRVMTPDLRERLENLRKKPEN |
| Helical I, | IPQPISNTSRANLNKLLTDYTEMKKAILHVYWEEFQKDPVGLMSRVAQPAPKNI |
| Helical II and | DQRKLIPVKDGNERLTSSGFACSQCCQPLYVYKLEQVNDKGKPHTNYFGRCNVS |
| OBD | EHERLILLSPHKPEANDELVTYSLGKFGQRALDFYSIHVTRESNHPVKPLEQIG |
| domains SEQ | GNSCASGPVGKALSDACMGAVASFLTKYQDIILEHQKVIKKNEKRLANLKDIAS |
| ID NO: 2 and | ANGLAFPKITLPPQPHTKEGIEAYNNVVAQIVIWVNLNLWQKLKIGRDEAKPLQ |
| an exogenous | RLKGFPSFPLVERQANEVDWWDMVCNVKKLINEKKEDGKVFWQNLAGYKRQEAL |
| RuvC | RPYLSSEEDRKKGKKFARYQFGDLLLHLEKKHGEDWGKVYDEAWERIDKKVEGL |
| domain or a | SKHIKLEEERRSEDAQSKAALTDWLRAKASFVIEGLKEADKDEFCRCELKLQKW |
| portion | YGDLRGKPFAIEAENSILDISGFSKQYNCAFIWQKDGVKKLNLYLIINYFKGGK |
| thereof from | LRFKKIKPEAFEANRFYTVINKKSGEIVPMEVNFNFDDPNLIILPLAFGKRQGR |
| a second | EFIWNDLLSLETGSLKLANGRVIEKTLYNRRTRQDEPALFVALTFERREVLDSS |
| CasX | NIKPVNLIGVDRGENIPAVIALTDPEGCPLPEFKDSSGGPTDILRIGEGYKEKQ |
| protein. | RAIQAAKEVEQRRAGGYSRKFASKSRNLADDMVRNSARDLFYHAVTHDAVLVFE |
| | NLSRGFGRQGKRTFMTERQYTKMEDWLTAKLAYEGLTSKTYLSKTLAQYTSKTC |
| | SNCGFTITSADYDRVLEKLKKTATGWMTTINGKELKVEGQITYYNRYKRQNVVK |
| | DLSVELDRLSEESVNNDISSWTKGRSGEALSLLKKRFSHRPVQEKFVCLNCGFE |
| | THA (SEQ ID NO: 40) |
| | MQEIKRINKIRRRLVKDSNIKKAGKTGPMKTLLVRVMTPDLRERLENLRKKPEN |
| | IPQPISNTSRANLNKLLTDYTEMKKAILHVYWEEFQKDPVGLMSRVAQPAPKNI |
| | DQRKLIPVKDGNERLTSSGFACSQCCQPLYVYKLEQVNDKGKPHTNYFGRCNVS |
| | EHERLILLSPHKPEANDELVTYSLGKFGQRALDFYSIHVTRESNHPVKPLEQIG |
| | GNSCASGPVGKALSDACMGAVASFLTKYQDIILEHQKVIKKNEKRLANLKDIAS |
| | ANGLAFPKITLPPQPHTKEGIEAYNNVVAQIVIWVNLNLWQKLKIGRDEAKPLQ |
| | RLKGFPSFPLVERQANEVDWWDMVCNVKKLINEKKEDGKVFWQNLAGYKRQEAL |
| | RPYLSSEEDRKKGKKFARYQFGDLLLHLEKKHGEDWGKVYDEAWERIDKKVEGL |
| | SKHIKLEEERRSEDAQSKAALTDWLRAKASFVIEGLKEADKDEFCRCELKLQKW |
| | YGDLRGKPFAIEAENSILDISGFSKQYNCAFIWQKDGVKKLNLYLIINYFKGGK |
| | LRFKKIKPEAFEANRFYTVINKKSGEIVPMEVNFNFDDPNLIILPLAFGKRQGR |
| | EFIWNDLLSLETGSLKLANGRVIEKTLYNRRTRQDEPALFVALTFERREVLDSS |
| | NIKPMNLIGIDRGENIPAVIALTDPEGCPLSRFKDSLGNPTHILRIGESYKEKQ |
| | RTIQAKKEVEQRRAGGYSRKYASKAKNLADDMVRNTARDLLYYAVTQDAMLIFE |
| | NLSRGFGRQGKRTFMAERQYTRMEDWLTAKLAYEGLSKTYLSKTLAQYTSKTCS |
| | NCGFTITSADYDRVLEKLKKTATGWMTTINGKELKVEGQITYYNRYKRQNVVKD |
| | LSVELDRLSEESVNNDISSWTKGRSGEALSLLKKRFSHRPVQEKFVCLNCGFET |
| | HA (SEQ ID NO: 41) |
| NTSB, TSL, | MQEIKRINKIRRRLVKDSNIKKAGKTGPMKTLLVRVMTPDLRERLENLRKKPEN |
| Helical II, | IPQPISNNAANNLRMLLDDYTKMKEAILQVYWQEFKDDHVGLMCKFAQPAPKNI |
| OBD and | DQRKLIPVKDGNERLTSSGFACSQCCQPLYVYKLEQVNDKGKPHTNYFGRCNVS |
| RuvC | EHERLILLSPHKPEANDELVTYSLGKFGQRALDFYSIHVTKESTHPVKPLAQIA |
| domains | GNRYASGPVGKALSDACMGTIASFLSKYQDIIIEHQKVVKGNQKRLESLRELAG |
| from SEQ ID | KENLEYPSVTLPPQPHTKEGVDAYNEVIARVRMWVNLNLWQKLKLSRDDAKPLL |
| NO: 2 and a | RLKGFPSFPLVERQANEVDWWDMVCNVKKLINEKKEDGKVFWQNLAGYKRQEAL |
| Helical I | RPYLSSEEDRKKGKKFARYQFGDLLLHLEKKHGEDWGKVYDEAWERIDKKVEGL |
| domain from | SKHIKLEEERRSEDAQSKAALTDWLRAKASFVIEGLKEADKDEFCRCELKLQKW |
| SEQ ID NO: | YGDLRGKPFAIEAENSILDISGFSKQYNCAFIWQKDGVKKLNLYLIINYFKGGK |
| 1 | LRFKKIKPEAFEANRFYTVINKKSGEIVPMEVNFNFDDPNLIILPLAFGKRQGR |
| | EFIWNDLLSLETGSLKLANGRVIEKTLYNRRTRQDEPALFVALTFERREVLDSS |
| | NIKPMNLIGIDRGENIPAVIALTDPEGCPLSRFKDSLGNPTHILRIGESYKEKQ |
| | RTIQAKKEVEQRRAGGYSRKYASKAKNLADDMVRNTARDLLYYAVTQDAMLIFE |
| | NLSRGFGRQGKRTFMAERQYTRMEDWLTAKLAYEGLSKTYLSKTLAQYTSKTCS |
| | NCGFTITSADYDRVLEKLKKTATGWMTTINGKELKVEGQITYYNRYKRQNVVKD |
| | LSVELDRLSEESVNNDISSWTKGRSGEALSLLKKRFSHRPVQEKFVCLNCGFET |
| | HADEQAALNIARSWLFLRSQEYKKYQTNKTTGNTDKRAFVETWQSFYRKKLKEV |
| | WKPAV (SEQ ID NO: 42) |
| NTSB, TSL, | MQEIKRINKIRRRLVKDSNIKKAGKTGPMKTLLVRVMTPDLRERLENLRKKPEN |
| Helical I, | IPQPISNTSRANLNKLLTDYTEMKKAILHVYWEEFQKDPVGLMSRVAQPAPKNI |
| OBD and | DQRKLIPVKDGNERLTSSGFACSQCCQPLYVYKLEQVNDKGKPHTNYFGRCNVS |
| RuvC | EHERLILLSPHKPEANDELVTYSLGKFGQRALDFYSIHVTRESNHPVKPLEQIG |
| domains | GNSCASGPVGKALSDACMGAVASFLTKYQDIILEHQKVIKKNEKRLANLKDIAS |
| from SEQ ID | ANGLAFPKITLPPQPHTKEGIEAYNNVVAQIVIWVNLNLWQKLKIGRDEAKPLQ |
| NO: 2 and a | RLKGFPSFPVVERRENEVDWWNTINEVKKLIDAKRDMGRVFWSGVTAEKRNTIL |
| Helical II | EGYNYLPNENDHKKREGSLENPKKPAKRQFGDLLLYLEKKYAGDWGKVFDEAWE |
| domain from | RIDKKIAGLTSHIEREEARNAEDAQSKAVLTDWLRAKASFVLERLKEMDEKEFY |
| SEQ ID NO: | ACEIQLQKWYGDLRGNPFAVEAENSILDISGFSKQYNCAFIWQKDGVKKLNLYL |
| 1 | IINYFKGGKLRFKKIKPEAFEANRFYTVINKKSGEIVPMEVNFNFDDPNLIILP |
| | LAFGKRQGREFIWNDLLSLETGSLKLANGRVIEKTLYNRRTRQDEPALFVALTF |
| | ERREVLDSSNIKPMNLIGIDRGENIPAVIALTDPEGCPLSRFKDSLGNPTHILR |
| | IGESYKEKQRTIQAKKEVEQRRAGGYSRKYASKAKNLADDMVRNTARDLLYYAV |
| | TQDAMLIFENLSRGFGRQGKRTFMAERQYTRMEDWLTAKLAYEGLSKTYLSKTL |
| | AQYTSKTCSNCGFTITSADYDRVLEKLKKTATGWMTTINGKELKVEGQITYYNR |
| | YKRQNVVKDLSVELDRLSEESVNNDISSWTKGRSGEALSLLKKRFSHRPVQEKF |
| | VCLNCGFETHADEQAALNIARSWLFLRSQEYKKYQTNKTTGNTDKRAFVETWQS |
| | FYRKKLKEVWKPAV (SEQ ID NO: 43) |
| NTSB, TSL, | MISNTSRANLNKLLTDYTEMKKAILHVYWEEFQKDPVGLMSRVAQPAPKNIDQR |
| Helical I, | KLIPVKDGNERLTSSGFACSQCCQPLYVYKLEQVNDKGKPHTNYFGRCNVSEHE |
| Helical II and | RLILLSPHKPEANDELVTYSLGKFGQRALDFYSIHVTRESNHPVKPLEQIGGNS |
| RuvC | CASGPVGKALSDACMGAVASFLTKYQDIILEHQKVIKKNEKRLANLKDIASANG |
| domains | LAFPKITLPPQPHTKEGIEAYNNVVAQIVIWVNLNLWQKLKIGRDEAKPLQRLK |
| from a first | GFPSFPLVERQANEVDWWDMVCNVKKLINEKKEDGKVFWQNLAGYKRQEALRPY |
| CasX protein | LSSEEDRKKGKKFARYQFGDLLLHLEKKHGEDWGKVYDEAWERIDKKVEGLSKH |
| and an | IKLEEERRSEDAQSKAALTDWLRAKASFVIEGLKEADKDEFCRCELKLQKWYGD |
| exogenous | LRGKPFAIEAENRVVDISGFSIGSDGHSIQYRNLLAWKYLENGKREFYLLMNYG |
| OBD or a | KKGRIRFTDGTDIKKSGKWQGLLYGGGKAKVIDLTFDPDDEQLIILPLAFGTRQ |
| part thereof | GREFIWNDLLSLETGLIKLANGRVIEKTIYNKKIGRDEPALFVALTFERREVVD |
| from a | PSNIKPMNLIGIDRGENIPAVIALTDPEGCPLSRFKDSLGNPTHILRIGESYKE |
| second CasX | KQRTIQAKKEVEQRRAGGYSRKYASKAKNLADDMVRNTARDLLYYAVTQDAMLI |
| protein | FENLSRGFGRQGKRTFMAERQYTRMEDWLTAKLAYEGLSKTYLSKTLAQYTSKT |
| | CSNCGFTITSADYDRVLEKLKKTATGWMTTINGKELKVEGQITYYNRYKRQNVV |
| | KDLSVELDRLSEESVNNDISSWTKGRSGEALSLLKKRFSHRPVQEKFVCLNCGF |
| | ETHADEQAALNIARSWLFLRSQEYKKYQTNKTTGNTDKRAFVETWQSFYRKKLK |
| | EVWKPAV (SEQ ID NO: 44) |
| | MEKRINKIRKKLSADNATKPVSRSGPMKTLLVRVMTDDLKKRLEKRRKKPEVMP |
| | QVISNTSRANLNKLLTDYTEMKKAILHVYWEEFQKDPVGLMSRVAQPAPKNIDQ |
| | RKLIPVKDGNERLTSSGFACSQCCQPLYVYKLEQVNDKGKPHTNYFGRCNVSEH |
| | ERLILLSPHKPEANDELVTYSLGKFGQRALDFYSIHVTRESNHPVKPLEQIGGN |
| | SCASGPVGKALSDACMGAVASFLTKYQDIILEHQKVIKKNEKRLANLKDIASAN |
| | GLAFPKITLPPQPHTKEGIEAYNNVVAQIVIWVNLNLWQKLKIGRDEAKPLQRL |
| | KGFPSFPLVERQANEVDWWDMVCNVKKLINEKKEDGKVFWQNLAGYKRQEALRP |
| | YLSSEEDRKKGKKFARYQFGDLLLHLEKKHGEDWGKVYDEAWERIDKKVEGLSK |
| | HIKLEEERRSEDAQSKAALTDWLRAKASFVIEGLKEADKDEFCRCELKLQKWYG |
| | DLRGKPFAIEAENSILDISGFSKQYNCAFIWQKDGVKKLNLYLIINYFKGGKLR |
| | FKKIKPEAFEANRFYTVINKKSGEIVPMEVNFNFDDPNLIILPLAFGKRQGREF |
| | IWNDLLSLETGSLKLANGRVIEKTLYNRRTRQDEPALFVALTFERREVLDSSNI |
| | KPMNLIGIDRGENIPAVIALTDPEGCPLSRFKDSLGNPTHILRIGESYKEKQRT |
| | IQAKKEVEQRRAGGYSRKYASKAKNLADDMVRNTARDLLYYAVTQDAMLIFENL |
| | SRGFGRQGKRTFMAERQYTRMEDWLTAKLAYEGLSKTYLSKTLAQYTSKTCSNC |
| | GFTITSADYDRVLEKLKKTATGWMTTINGKELKVEGQITYYNRYKRQNVVKDLS |
| | VELDRLSEESVNNDISSWTKGRSGEALSLLKKRFSHRPVQEKFVCLNCGFETHA |
| | DEQAALNIARSWLFLRSQEYKKYQTNKTTGNTDKRAFVETWQSFYRKKLKEVWK |
| | PAV (SEQ ID NO: 45) |
| | MQEIKRINKIRRRLVKDSNIKKAGKTGPMKTLLVRVMTPDLRERLENLRKKPEN |
| | IPQPISNTSRANLNKLLTDYTEMKKAILHVYWEEFQKDPVGLMSRVAQPAPKNI |
| | DQRKLIPVKDGNERLTSSGFACSQCCQPLYVYKLEQVNDKGKPHTNYFGRCNVS |
| | EHERLILLSPHKPEANDELVTYSLGKFGQRALDFYSIHVTRESNHPVKPLEQIG |
| | GNSCASGPVGKALSDACMGAVASFLTKYQDIILEHQKVIKKNEKRLANLKDIAS |
| | ANGLAFPKITLPPQPHTKEGIEAYNNVVAQIVIWVNLNLWQKLKIGRDEAKPLQ |
| | RLKGFPSFPLVERQANEVDWWDMVCNVKKLINEKKEDGKVFWQNLAGYKRQEAL |
| | RPYLSSEEDRKKGKKFARYQFGDLLLHLEKKHGEDWGKVYDEAWERIDKKVEGL |
| | SKHIKLEEERRSEDAQSKAALTDWLRAKASFVIEGLKEADKDEFCRCELKLQKW |
| | YGDLRGKPFAIEAENRVVDISGFSIGSDGHSIQYRNLLAWKYLENGKREFYLLM |
| | NYGKKGRIRFTDGTDIKKSGKWQGLLYGGGKAKVIDLTFDPDDEQLIILPLAFG |
| | TRQGREFIWNDLLSLETGLIKLANGRVIEKTIYNKKIGRDEPALFVALTFERRE |
| | VVDPSNIKPMNLIGIDRGENIPAVIALTDPEGCPLSRFKDSLGNPTHILRIGES |
| | YKEKQRTIQAKKEVEQRRAGGYSRKYASKAKNLADDMVRNTARDLLYYAVTQDA |
| | MLIFENLSRGFGRQGKRTFMAERQYTRMEDWLTAKLAYEGLSKTYLSKTLAQYT |
| | SKTCSNCGFTITSADYDRVLEKLKKTATGWMTTINGKELKVEGQITYYNRYKRQ |
| | NVVKDLSVELDRLSEESVNNDISSWTKGRSGEALSLLKKRFSHRPVQEKFVCLN |
| | CGFETHADEQAALNIARSWLFLRSQEYKKYQTNKTTGNTDKRAFVETWQSFYRK |
| | KLKEVWKPAV (SEQ ID NO: 46) |
| substitution | MQEIKRINKIRRRLVKDSNIKKAGKTGPMKTLLVRVMTPDLRERLENLRKKPEN |
| of L379R, a | IPQPISNTSRANLNKLLTDYTEMKKAILHVYWEEFQKDPVGLMSRVAQPAPKNI |
| substitution | DQRKLIPVKDGNERLTSSGFACSQCCQPLYVYKLEQVNDKGKPHTNYFGRCNVS |
| of C477K, a | EHERLILLSPHKPEANDELVTYSLGKFGQRALDFYSIHVTRESNHPVKPLEQIG |
| substitution | GNSCASGPVGKALSDACMGAVASFLTKYQDIILEHQKVIKKNEKRLANLKDIAS |
| of A708K, a | ANGLAFPKITLPPQPHTKEGIEAYNNVVAQIVIWVNLNLWQKLKIGRDEAKPLQ |
| deletion of P | RLKGFPSFPLVERQANEVDWWDMVCNVKKLINEKKEDGKVFWQNLAGYKRQEAL |
| at position | RPYLSSEEDRKKGKKFARYQFGDLLLHLEKKHGEDWGKVYDEAWERIDKKVEGL |
| 793 and a | SKHIKLEEERRSEDAQSKAALTDWLRAKASFVIEGLKEADKDEFKRCELKLQKW |
| substitution | YGDLRGKPFAIEAENSILDISGFSKQYNCAFIWQKDGVKKLNLYLIINYFKGGK |
| of T620P of | LRFKKIKPEAFEANRFYTVINKKSGEIVPMEVNFNFDDPNLIILPLAFGKRQGR |
| SEQ ID NO: | EFIWNDLLSLETGSLKLANGRVIEKPLYNRRTRQDEPALFVALTFERREVLDSS |
| 2 | NIKPMNLIGIDRGENIPAVIALTDPEGCPLSRFKDSLGNPTHILRIGESYKEKQ |
| | RTIQAKKEVEQRRAGGYSRKYASKAKNLADDMVRNTARDLLYYAVTQDAMLIFE |
| | NLSRGFGRQGKRTFMAERQYTRMEDWLTAKLAYEGLSKTYLSKTLAQYTSKTCS |
| | NCGFTITSADYDRVLEKLKKTATGWMTTINGKELKVEGQITYYNRYKRQNVVKD |
| | LSVELDRLSEESVNNDISSWTKGRSGEALSLLKKRFSHRPVQEKFVCLNCGFET |
| | HADEQAALNIARSWLFLRSQEYKKYQTNKTTGNTDKRAFVETWQSFYRKKLKEV |
| | WKPAV (SEQ ID NO: 47) |
| substitution | MQEIKRINKIRRRLVKDSNIKKAGKTGPMKTLLVRVMTPDLRERLENLRKKPEN |
| of M771A of | IPQPISNTSRANLNKLLTDYTEMKKAILHVYWEEFQKDPVGLMSRVAQPAPKNI |
| SEQ ID NO: | DQRKLIPVKDGNERLTSSGFACSQCCQPLYVYKLEQVNDKGKPHTNYFGRCNVS |
| 2. | EHERLILLSPHKPEANDELVTYSLGKFGQRALDFYSIHVTRESNHPVKPLEQIG |
| | GNSCASGPVGKALSDACMGAVASFLTKYQDIILEHQKVIKKNEKRLANLKDIAS |
| | ANGLAFPKITLPPQPHTKEGIEAYNNVVAQIVIWVNLNLWQKLKIGRDEAKPLQ |
| | RLKGFPSFPLVERQANEVDWWDMVCNVKKLINEKKEDGKVFWQNLAGYKRQEAL |
| | LPYLSSEEDRKKGKKFARYQFGDLLLHLEKKHGEDWGKVYDEAWERIDKKVEGL |
| | SKHIKLEEERRSEDAQSKAALTDWLRAKASFVIEGLKEADKDEFCRCELKLQKW |
| | YGDLRGKPFAIEAENSILDISGFSKQYNCAFIWQKDGVKKLNLYLIINYFKGGK |
| | LRFKKIKPEAFEANRFYTVINKKSGEIVPMEVNFNFDDPNLIILPLAFGKRQGR |
| | EFIWNDLLSLETGSLKLANGRVIEKTLYNRRTRQDEPALFVALTFERREVLDSS |
| | NIKPMNLIGIDRGENIPAVIALTDPEGCPLSRFKDSLGNPTHILRIGESYKEKQ |
| | RTIQAAKEVEQRRAGGYSRKYASKAKNLADDMVRNTARDLLYYAVTQDAMLIFE |
| | NLSRGFGRQGKRTFAAERQYTRMEDWLTAKLAYEGLPSKTYLSKTLAQYTSKTC |
| | SNCGFTITSADYDRVLEKLKKTATGWMTTINGKELKVEGQITYYNRYKRQNVVK |
| | DLSVELDRLSEESVNNDISSWTKGRSGEALSLLKKRFSHRPVQEKFVCLNCGFE |
| | THADEQAALNIARSWLFLRSQEYKKYQTNKTTGNTDKRAFVETWQSFYRKKLKE |
| | VWKPA (SEQ ID NO: 48) |
| substitution | MQEIKRINKIRRRLVKDSNIKKAGKTGPMKTLLVRVMTPDLRERLENLRKKPEN |
| of L379R, a | IPQPISNTSRANLNKLLTDYTEMKKAILHVYWEEFQKDPVGLMSRVAQPAPKNI |
| substitution | DQRKLIPVKDGNERLTSSGFACSQCCQPLYVYKLEQVNDKGKPHTNYFGRCNVS |
| of A708K, a | EHERLILLSPHKPEANDELVTYSLGKFGQRALDFYSIHVTRESNHPVKPLEQIG |
| deletion of P | GNSCASGPVGKALSDACMGAVASFLTKYQDIILEHQKVIKKNEKRLANLKDIAS |
| at position | ANGLAFPKITLPPQPHTKEGIEAYNNVVAQIVIWVNLNLWQKLKIGRDEAKPLQ |
| 793 and a | RLKGFPSFPLVERQANEVDWWDMVCNVKKLINEKKEDGKVFWQNLAGYKRQEAL |
| substitution | RPYLSSEEDRKKGKKFARYQFGDLLLHLEKKHGEDWGKVYDEAWERIDKKVEGL |
| of D732N of | SKHIKLEEERRSEDAQSKAALTDWLRAKASFVIEGLKEADKDEFCRCELKLQKW |
| SEQ ID NO: | YGDLRGKPFAIEAENSILDISGFSKQYNCAFIWQKDGVKKLNLYLIINYFKGGK |
| 2. | LRFKKIKPEAFEANRFYTVINKKSGEIVPMEVNFNFDDPNLIILPLAFGKRQGR |
| | EFIWNDLLSLETGSLKLANGRVIEKTLYNRRTRQDEPALFVALTFERREVLDSS |
| | NIKPMNLIGIDRGENIPAVIALTDPEGCPLSRFKDSLGNPTHILRIGESYKEKQ |
| | RTIQAKKEVEQRRAGGYSRKYASKAKNLANDMVRNTARDLLYYAVTQDAMLIFE |
| | NLSRGFGRQGKRTFMAERQYTRMEDWLTAKLAYEGLSKTYLSKTLAQYTSKTCS |
| | NCGFTITSADYDRVLEKLKKTATGWMTTINGKELKVEGQITYYNRYKRQNVVKD |
| | LSVELDRLSEESVNNDISSWTKGRSGEALSLLKKRFSHRPVQEKFVCLNCGFET |
| | HADEQAALNIARSWLFLRSQEYKKYQTNKTTGNTDKRAFVETWQSFYRKKLKEV |
| | WKPAV (SEQ ID NO: 49) |
| substitution | MQEIKRINKIRRRLVKDSNIKKAGKTGPMKTLLVRVMTPDLRERLENLRKKPEN |
| of W782Q of | IPQPISNTSRANLNKLLTDYTEMKKAILHVYWEEFQKDPVGLMSRVAQPAPKNI |
| SEQ ID NO: | DQRKLIPVKDGNERLTSSGFACSQCCQPLYVYKLEQVNDKGKPHTNYFGRCNVS |
| 2. | EHERLILLSPHKPEANDELVTYSLGKFGQRALDFYSIHVTRESNHPVKPLEQIG |
| | GNSCASGPVGKALSDACMGAVASFLTKYQDIILEHQKVIKKNEKRLANLKDIAS |
| | ANGLAFPKITLPPQPHTKEGIEAYNNVVAQIVIWVNLNLWQKLKIGRDEAKPLQ |
| | RLKGFPSFPLVERQANEVDWWDMVCNVKKLINEKKEDGKVFWQNLAGYKRQEAL |
| | LPYLSSEEDRKKGKKFARYQFGDLLLHLEKKHGEDWGKVYDEAWERIDKKVEGL |
| | SKHIKLEEERRSEDAQSKAALTDWLRAKASFVIEGLKEADKDEFCRCELKLQKW |
| | YGDLRGKPFAIEAENSILDISGFSKQYNCAFIWQKDGVKKLNLYLIINYFKGGK |
| | LRFKKIKPEAFEANRFYTVINKKSGEIVPMEVNFNFDDPNLIILPLAFGKRQGR |
| | EFIWNDLLSLETGSLKLANGRVIEKTLYNRRTRQDEPALFVALTFERREVLDSS |
| | NIKPMNLIGIDRGENIPAVIALTDPEGCPLSRFKDSLGNPTHILRIGESYKEKQ |
| | RTIQAAKEVEQRRAGGYSRKYASKAKNLADDMVRNTARDLLYYAVTQDAMLIFE |
| | NLSRGFGRQGKRTFMAERQYTRMEDQLTAKLAYEGLPSKTYLSKTLAQYTSKTC |
| | SNCGFTITSADYDRVLEKLKKTATGWMTTINGKELKVEGQITYYNRYKRQNVVK |
| | DLSVELDRLSEESVNNDISSWTKGRSGEALSLLKKRFSHRPVQEKFVCLNCGFE |
| | THADEQAALNIARSWLFLRSQEYKKYQTNKTTGNTDKRAFVETWQSFYRKKLKE |
| | VWKPAV (SEQ ID NO: 50) |
| substitution | MQEIKRINKIRRRLVKDSNIKKAGKTGPMKTLLVRVMTPDLRERLENLRKKPEN |
| of M771Q of | IPQPISNTSRANLNKLLTDYTEMKKAILHVYWEEFQKDPVGLMSRVAQPAPKNI |
| SEQ ID NO: | DQRKLIPVKDGNERLTSSGFACSQCCQPLYVYKLEQVNDKGKPHTNYFGRCNVS |
| 2 | EHERLILLSPHKPEANDELVTYSLGKFGQRALDFYSIHVTRESNHPVKPLEQIG |
| | GNSCASGPVGKALSDACMGAVASFLTKYQDIILEHQKVIKKNEKRLANLKDIAS |
| | ANGLAFPKITLPPQPHTKEGIEAYNNVVAQIVIWVNLNLWQKLKIGRDEAKPLQ |
| | RLKGFPSFPLVERQANEVDWWDMVCNVKKLINEKKEDGKVFWQNLAGYKRQEAL |
| | LPYLSSEEDRKKGKKFARYQFGDLLLHLEKKHGEDWGKVYDEAWERIDKKVEGL |
| | SKHIKLEEERRSEDAQSKAALTDWLRAKASFVIEGLKEADKDEFCRCELKLQKW |
| | YGDLRGKPFAIEAENSILDISGFSKQYNCAFIWQKDGVKKLNLYLIINYFKGGK |
| | LRFKKIKPEAFEANRFYTVINKKSGEIVPMEVNFNFDDPNLIILPLAFGKRQGR |
| | EFIWNDLLSLETGSLKLANGRVIEKTLYNRRTRQDEPALFVALTFERREVLDSS |
| | NIKPMNLIGIDRGENIPAVIALTDPEGCPLSRFKDSLGNPTHILRIGESYKEKQ |
| | RTIQAAKEVEQRRAGGYSRKYASKAKNLADDMVRNTARDLLYYAVTQDAMLIFE |
| | NLSRGFGRQGKRTFQAERQYTRMEDWLTAKLAYEGLPSKTYLSKTLAQYTSKTC |
| | SNCGFTITSADYDRVLEKLKKTATGWMTTINGKELKVEGQITYYNRYKRQNVVK |
| | DLSVELDRLSEESVNNDISSWTKGRSGEALSLLKKRFSHRPVQEKFVCLNCGFE |
| | THADEQAALNIARSWLFLRSQEYKKYQTNKTTGNTDKRAFVETWQSFYRKKLKE |
| | VWKPAV (SEQ ID NO: 51) |
| substitution | MQEIKRINKIRRRLVKDSNIKKAGKTGPMKTLLVRVMTPDLRERLENLRKKPEN |
| of R458I and | IPQPISNTSRANLNKLLTDYTEMKKAILHVYWEEFQKDPVGLMSRVAQPAPKNI |
| a substitution | DQRKLIPVKDGNERLTSSGFACSQCCQPLYVYKLEQVNDKGKPHTNYFGRCNVS |
| of A739V of | EHERLILLSPHKPEANDELVTYSLGKFGQRALDFYSIHVTRESNHPVKPLEQIG |
| SEQ ID NO: | GNSCASGPVGKALSDACMGAVASFLTKYQDIILEHQKVIKKNEKRLANLKDIAS |
| 2. | ANGLAFPKITLPPQPHTKEGIEAYNNVVAQIVIWVNLNLWQKLKIGRDEAKPLQ |
| | RLKGFPSFPLVERQANEVDWWDMVCNVKKLINEKKEDGKVFWQNLAGYKRQEAL |
| | LPYLSSEEDRKKGKKFARYQFGDLLLHLEKKHGEDWGKVYDEAWERIDKKVEGL |
| | SKHIKLEEERRSEDAQSKAALTDWLIAKASFVIEGLKEADKDEFCRCELKLQKW |
| | YGDLRGKPFAIEAENSILDISGFSKQYNCAFIWQKDGVKKLNLYLIINYFKGGK |
| | LRFKKIKPEAFEANRFYTVINKKSGEIVPMEVNFNFDDPNLIILPLAFGKRQGR |
| | EFIWNDLLSLETGSLKLANGRVIEKTLYNRRTRQDEPALFVALTFERREVLDSS |
| | NIKPMNLIGIDRGENIPAVIALTDPEGCPLSRFKDSLGNPTHILRIGESYKEKQ |
| | RTIQAAKEVEQRRAGGYSRKYASKAKNLADDMVRNTVRDLLYYAVTQDAMLIFE |
| | NLSRGFGRQGKRTFMAERQYTRMEDWLTAKLAYEGLPSKTYLSKTLAQYTSKTC |
| | SNCGFTITSADYDRVLEKLKKTATGWMTTINGKELKVEGQITYYNRYKRQNVVK |
| | DLSVELDRLSEESVNNDISSWTKGRSGEALSLLKKRFSHRPVQEKFVCLNCGFE |
| | THADEQAALNIARSWLFLRSQEYKKYQTNKTTGNTDKRAFVETWQSFYRKKLKE |
| | VWKPAV (SEQ ID NO: 52) |
| L379R, a | MQEIKRINKIRRRLVKDSNIKKAGKTGPMKTLLVRVMTPDLRERLENLRKKPEN |
| substitution | IPQPISNTSRANLNKLLTDYTEMKKAILHVYWEEFQKDPVGLMSRVAQPAPKNI |
| of A708K, a | DQRKLIPVKDGNERLTSSGFACSQCCQPLYVYKLEQVNDKGKPHTNYFGRCNVS |
| deletion of P | EHERLILLSPHKPEANDELVTYSLGKFGQRALDFYSIHVTRESNHPVKPLEQIG |
| at position | GNSCASGPVGKALSDACMGAVASFLTKYQDIILEHQKVIKKNEKRLANLKDIAS |
| 793 and a | ANGLAFPKITLPPQPHTKEGIEAYNNVVAQIVIWVNLNLWQKLKIGRDEAKPLQ |
| substitution | RLKGFPSFPLVERQANEVDWWDMVCNVKKLINEKKEDGKVFWQNLAGYKRQEAL |
| of M771N of | RPYLSSEEDRKKGKKFARYQFGDLLLHLEKKHGEDWGKVYDEAWERIDKKVEGL |
| SEQ ID NO: | SKHIKLEEERRSEDAQSKAALTDWLRAKASFVIEGLKEADKDEFCRCELKLQKW |
| 2 | YGDLRGKPFAIEAENSILDISGFSKQYNCAFIWQKDGVKKLNLYLIINYFKGGK |
| | LRFKKIKPEAFEANRFYTVINKKSGEIVPMEVNFNFDDPNLIILPLAFGKRQGR |
| | EFIWNDLLSLETGSLKLANGRVIEKTLYNRRTRQDEPALFVALTFERREVLDSS |
| | NIKPMNLIGIDRGENIPAVIALTDPEGCPLSRFKDSLGNPTHILRIGESYKEKQ |
| | RTIQAKKEVEQRRAGGYSRKYASKAKNLADDMVRNTARDLLYYAVTQDAMLIFE |
| | NLSRGFGRQGKRTFNAERQYTRMEDWLTAKLAYEGLSKTYLSKTLAQYTSKTCS |
| | NCGFTITSADYDRVLEKLKKTATGWMTTINGKELKVEGQITYYNRYKRQNVVKD |
| | LSVELDRLSEESVNNDISSWTKGRSGEALSLLKKRFSHRPVQEKFVCLNCGFET |
| | HADEQAALNIARSWLFLRSQEYKKYQTNKTTGNTDKRAFVETWQSFYRKKLKEV |
| | WKPAV (SEQ ID NO: 53) |
| substitution | MQEIKRINKIRRRLVKDSNIKKAGKTGPMKTLLVRVMTPDLRERLENLRKKPEN |
| of L379R, a | IPQPISNTSRANLNKLLTDYTEMKKAILHVYWEEFQKDPVGLMSRVAQPAPKNI |
| substitution | DQRKLIPVKDGNERLTSSGFACSQCCQPLYVYKLEQVNDKGKPHTNYFGRCNVS |
| of A708K, a | EHERLILLSPHKPEANDELVTYSLGKFGQRALDFYSIHVTRESNHPVKPLEQIG |
| deletion of P | GNSCASGPVGKALSDACMGAVASFLTKYQDIILEHQKVIKKNEKRLANLKDIAS |
| at position | ANGLAFPKITLPPQPHTKEGIEAYNNVVAQIVIWVNLNLWQKLKIGRDEAKPLQ |
| 793 and a | RLKGFPSFPLVERQANEVDWWDMVCNVKKLINEKKEDGKVFWQNLAGYKRQEAL |
| substitution | RPYLSSEEDRKKGKKFARYQFGDLLLHLEKKHGEDWGKVYDEAWERIDKKVEGL |
| of A739T of | SKHIKLEEERRSEDAQSKAALTDWLRAKASFVIEGLKEADKDEFCRCELKLQKW |
| SEQ ID NO: | YGDLRGKPFAIEAENSILDISGFSKQYNCAFIWQKDGVKKLNLYLIINYFKGGK |
| 2 | LRFKKIKPEAFEANRFYTVINKKSGEIVPMEVNFNFDDPNLIILPLAFGKRQGR |
| | EFIWNDLLSLETGSLKLANGRVIEKTLYNRRTRQDEPALFVALTFERREVLDSS |
| | NIKPMNLIGIDRGENIPAVIALTDPEGCPLSRFKDSLGNPTHILRIGESYKEKQ |
| | RTIQAKKEVEQRRAGGYSRKYASKAKNLADDMVRNTTRDLLYYAVTQDAMLIFE |
| | NLSRGFGRQGKRTFMAERQYTRMEDWLTAKLAYEGLSKTYLSKTLAQYTSKTCS |
| | NCGFTITSADYDRVLEKLKKTATGWMTTINGKELKVEGQITYYNRYKRQNVVKD |
| | LSVELDRLSEESVNNDISSWTKGRSGEALSLLKKRFSHRPVQEKFVCLNCGFET |
| | HADEQAALNIARSWLFLRSQEYKKYQTNKTTGNTDKRAFVETWQSFYRKKLKEV |
| | WKPAV (SEQ ID NO: 54) |
| substitution | MQEIKRINKIRRRLVKDSNIKKAGKTGPMKTLLVRVMTPDLRERLENLRKKPEN |
| of L379R, a | IPQPISNTSRANLNKLLTDYTEMKKAILHVYWEEFQKDPVGLMSRVAQPAPKNI |
| substitution | DQRKLIPVKDGNERLTSSGFACSQCCQPLYVYKLEQVNDKGKPHTNYFGRCNVS |
| of C477K, a | EHERLILLSPHKPEANDELVTYSLGKFGQRALDFYSIHVTRESNHPVKPLEQIG |
| substitution | GNSCASGPVGKALSDACMGAVASFLTKYQDIILEHQKVIKKNEKRLANLKDIAS |
| of A708K, a | ANGLAFPKITLPPQPHTKEGIEAYNNVVAQIVIWVNLNLWQKLKIGRDEAKPLQ |
| deletion of P | RLKGFPSFPLVERQANEVDWWDMVCNVKKLINEKKEDGKVFWQNLAGYKRQEAL |
| at position | RPYLSSEEDRKKGKKFARYQFGDLLLHLEKKHGEDWGKVYDEAWERIDKKVEGL |
| 793 and a | SKHIKLEEERRSEDAQSKAALTDWLRAKASFVIEGLKEADKDEFKRCELKLQKW |
| substitution | YGSLRGKPFAIEAENSILDISGFSKQYNCAFIWQKDGVKKLNLYLIINYFKGGK |
| of D489S of | LRFKKIKPEAFEANRFYTVINKKSGEIVPMEVNFNFDDPNLIILPLAFGKRQGR |
| SEQ ID NO: | EFIWNDLLSLETGSLKLANGRVIEKTLYNRRTRQDEPALFVALTFERREVLDSS |
| 2. | NIKPMNLIGIDRGENIPAVIALTDPEGCPLSRFKDSLGNPTHILRIGESYKEKQ |
| | RTIQAKKEVEQRRAGGYSRKYASKAKNLADDMVRNTARDLLYYAVTQDAMLIFE |
| | NLSRGFGRQGKRTFMAERQYTRMEDWLTAKLAYEGLSKTYLSKTLAQYTSKTCS |
| | NCGFTITSADYDRVLEKLKKTATGWMTTINGKELKVEGQITYYNRYKRQNVVKD |
| | LSVELDRLSEESVNNDISSWTKGRSGEALSLLKKRFSHRPVQEKFVCLNCGFET |
| | HADEQAALNIARSWLFLRSQEYKKYQTNKTTGNTDKRAFVETWQSFYRKKLKEV |
| | WKPAV (SEQ ID NO: 55) |
| substitution | MQEIKRINKIRRRLVKDSNIKKAGKTGPMKTLLVRVMTPDLRERLENLRKKPEN |
| of L379R, a | IPQPISNTSRANLNKLLTDYTEMKKAILHVYWEEFQKDPVGLMSRVAQPAPKNI |
| substitution | DQRKLIPVKDGNERLTSSGFACSQCCQPLYVYKLEQVNDKGKPHTNYFGRCNVS |
| of C477K, a | EHERLILLSPHKPEANDELVTYSLGKFGQRALDFYSIHVTRESNHPVKPLEQIG |
| substitution | GNSCASGPVGKALSDACMGAVASFLTKYQDIILEHQKVIKKNEKRLANLKDIAS |
| of A708K, a | ANGLAFPKITLPPQPHTKEGIEAYNNVVAQIVIWVNLNLWQKLKIGRDEAKPLQ |
| deletion of P | RLKGFPSFPLVERQANEVDWWDMVCNVKKLINEKKEDGKVFWQNLAGYKRQEAL |
| at position | RPYLSSEEDRKKGKKFARYQFGDLLLHLEKKHGEDWGKVYDEAWERIDKKVEGL |
| 793 and a | SKHIKLEEERRSEDAQSKAALTDWLRAKASFVIEGLKEADKDEFKRCELKLQKW |
| substitution | YGDLRGKPFAIEAENSILDISGFSKQYNCAFIWQKDGVKKLNLYLIINYFKGGK |
| of D732N of | LRFKKIKPEAFEANRFYTVINKKSGEIVPMEVNFNFDDPNLIILPLAFGKRQGR |
| SEQ ID NO: | EFIWNDLLSLETGSLKLANGRVIEKTLYNRRTRQDEPALFVALTFERREVLDSS |
| 2. | NIKPMNLIGIDRGENIPAVIALTDPEGCPLSRFKDSLGNPTHILRIGESYKEKQ |
| | RTIQAKKEVEQRRAGGYSRKYASKAKNLANDMVRNTARDLLYYAVTQDAMLIFE |
| | NLSRGFGRQGKRTFMAERQYTRMEDWLTAKLAYEGLSKTYLSKTLAQYTSKTCS |
| | NCGFTITSADYDRVLEKLKKTATGWMTTINGKELKVEGQITYYNRYKRQNVVKD |
| | LSVELDRLSEESVNNDISSWTKGRSGEALSLLKKRFSHRPVQEKFVCLNCGFET |
| | HADEQAALNIARSWLFLRSQEYKKYQTNKTTGNTDKRAFVETWQSFYRKKLKEV |
| | WKPAV (SEQ ID NO: 56) |
| substitution | MQEIKRINKIRRRLVKDSNIKKAGKTGPMKTLLVRVMTPDLRERLENLRKKPEN |
| of V711K of | IPQPISNTSRANLNKLLTDYTEMKKAILHVYWEEFQKDPVGLMSRVAQPAPKNI |
| SEQ ID NO: | DQRKLIPVKDGNERLTSSGFACSQCCQPLYVYKLEQVNDKGKPHTNYFGRCNVS |
| 2. | EHERLILLSPHKPEANDELVTYSLGKFGQRALDFYSIHVTRESNHPVKPLEQIG |
| | GNSCASGPVGKALSDACMGAVASFLTKYQDIILEHQKVIKKNEKRLANLKDIAS |
| | ANGLAFPKITLPPQPHTKEGIEAYNNVVAQIVIWVNLNLWQKLKIGRDEAKPLQ |
| | RLKGFPSFPLVERQANEVDWWDMVCNVKKLINEKKEDGKVFWQNLAGYKRQEAL |
| | LPYLSSEEDRKKGKKFARYQFGDLLLHLEKKHGEDWGKVYDEAWERIDKKVEGL |
| | SKHIKLEEERRSEDAQSKAALTDWLRAKASFVIEGLKEADKDEFCRCELKLQKW |
| | YGDLRGKPFAIEAENSILDISGFSKQYNCAFIWQKDGVKKLNLYLIINYFKGGK |
| | LRFKKIKPEAFEANRFYTVINKKSGEIVPMEVNFNFDDPNLIILPLAFGKRQGR |
| | EFIWNDLLSLETGSLKLANGRVIEKTLYNRRTRQDEPALFVALTFERREVLDSS |
| | NIKPMNLIGIDRGENIPAVIALTDPEGCPLSRFKDSLGNPTHILRIGESYKEKQ |
| | RTIQAAKEKEQRRAGGYSRKYASKAKNLADDMVRNTARDLLYYAVTQDAMLIFE |
| | NLSRGFGRQGKRTFMAERQYTRMEDWLTAKLAYEGLPSKTYLSKTLAQYTSKTC |
| | SNCGFTITSADYDRVLEKLKKTATGWMTTINGKELKVEGQITYYNRYKRQNVVK |
| | DLSVELDRLSEESVNNDISSWTKGRSGEALSLLKKRFSHRPVQEKFVCLNCGFE |
| | THADEQAALNIARSWLFLRSQEYKKYQTNKTTGNTDKRAFVETWQSFYRKKLKE |
| | VWKPAV (SEQ ID NO: 57) |
| substitution | MQEIKRINKIRRRLVKDSNIKKAGKTGPMKTLLVRVMTPDLRERLENLRKKPEN |
| of L379R, a | IPQPISNTSRANLNKLLTDYTEMKKAILHVYWEEFQKDPVGLMSRVAQPAPKNI |
| substitution | DQRKLIPVKDGNERLTSSGFACSQCCQPLYVYKLEQVNDKGKPHTNYFGRCNVS |
| of C477K, a | EHERLILLSPHKPEANDELVTYSLGKFGQRALDFYSIHVTRESNHPVKPLEQIG |
| substitution | GNSCASGPVGKALSDACMGAVASFLTKYQDIILEHQKVIKKNEKRLANLKDIAS |
| of A708K, a | ANGLAFPKITLPPQPHTKEGIEAYNNVVAQIVIWVNLNLWQKLKIGRDEAKPLQ |
| deletion of P | RLKGFPSFPLVERQANEVDWWDMVCNVKKLINEKKEDGKVFWQNLAGYKRQEAL |
| at position | RPYLSSEEDRKKGKKFARYQFGDLLLHLEKKHGEDWGKVYDEAWERIDKKVEGL |
| 793 and a | SKHIKLEEERRSEDAQSKAALTDWLRAKASFVIEGLKEADKDEFKRCELKLQKW |
| substitution | YGDLRGKPFAIEAENSILDISGFSKQYNCAFIWQKDGVKKLNLYLIINYFKGGK |
| of Y797L of | LRFKKIKPEAFEANRFYTVINKKSGEIVPMEVNFNFDDPNLIILPLAFGKRQGR |
| SEQ ID NO: | EFIWNDLLSLETGSLKLANGRVIEKTLYNRRTRQDEPALFVALTFERREVLDSS |
| 2. | NIKPMNLIGIDRGENIPAVIALTDPEGCPLSRFKDSLGNPTHILRIGESYKEKQ |
| | RTIQAKKEVEQRRAGGYSRKYASKAKNLADDMVRNTARDLLYYAVTQDAMLIFE |
| | NLSRGFGRQGKRTFMAERQYTRMEDWLTAKLAYEGLSKILLSKTLAQYTSKTCS |
| | NCGFTITSADYDRVLEKLKKTATGWMTTINGKELKVEGQITYYNRYKRQNVVKD |
| | LSVELDRLSEESVNNDISSWTKGRSGEALSLLKKRFSHRPVQEKFVCLNCGFET |
| | HADEQAALNIARSWLFLRSQEYKKYQTNKTTGNTDKRAFVETWQSFYRKKLKEV |
| | WKPAV (SEQ ID NO: 58) |
| 119: | MQEIKRINKIRRRLVKDSNIKKAGKTGPMKTLLVRVMTPDLRERLENLRKKPEN |
| substitution | IPQPISNTSRANLNKLLTDYTEMKKAILHVYWEEFQKDPVGLMSRVAQPAPKNI |
| of L379R, a | DQRKLIPVKDGNERLTSSGFACSQCCQPLYVYKLEQVNDKGKPHTNYFGRCNVS |
| substitution | EHERLILLSPHKPEANDELVTYSLGKFGQRALDFYSIHVTRESNHPVKPLEQIG |
| of A708K | GNSCASGPVGKALSDACMGAVASFLTKYQDIILEHQKVIKKNEKRLANLKDIAS |
| and a | ANGLAFPKITLPPQPHTKEGIEAYNNVVAQIVIWVNLNLWQKLKIGRDEAKPLQ |
| deletion of P | RLKGFPSFPLVERQANEVDWWDMVCNVKKLINEKKEDGKVFWQNLAGYKRQEAL |
| at position | RPYLSSEEDRKKGKKFARYQFGDLLLHLEKKHGEDWGKVYDEAWERIDKKVEGL |
| 793 of SEQ | SKHIKLEEERRSEDAQSKAALTDWLRAKASFVIEGLKEADKDEFCRCELKLQKW |
| ID NO: 2. | YGDLRGKPFAIEAENSILDISGFSKQYNCAFIWQKDGVKKLNLYLIINYFKGGK |
| | LRFKKIKPEAFEANRFYTVINKKSGEIVPMEVNFNFDDPNLIILPLAFGKRQGR |
| | EFIWNDLLSLETGSLKLANGRVIEKTLYNRRTRQDEPALFVALTFERREVLDSS |
| | NIKPMNLIGIDRGENIPAVIALTDPEGCPLSRFKDSLGNPTHILRIGESYKEKQ |
| | RTIQAKKEVEQRRAGGYSRKYASKAKNLADDMVRNTARDLLYYAVTQDAMLIFE |
| | NLSRGFGRQGKRTFMAERQYTRMEDWLTAKLAYEGLSKTYLSKTLAQYTSKTCS |
| | NCGFTITSADYDRVLEKLKKTATGWMTTINGKELKVEGQITYYNRYKRQNVVKD |
| | LSVELDRLSEESVNNDISSWTKGRSGEALSLLKKRFSHRPVQEKFVCLNCGFET |
| | HADEQAALNIARSWLFLRSQEYKKYQTNKTTGNTDKRAFVETWQSFYRKKLKEV |
| | WKPAV (SEQ ID NO: 59) |
| substitution | MQEIKRINKIRRRLVKDSNIKKAGKTGPMKTLLVRVMTPDLRERLENLRKKPEN |
| of L379R, a | IPQPISNTSRANLNKLLTDYTEMKKAILHVYWEEFQKDPVGLMSRVAQPAPKNI |
| substitution | DQRKLIPVKDGNERLTSSGFACSQCCQPLYVYKLEQVNDKGKPHTNYFGRCNVS |
| of C477K, a | EHERLILLSPHKPEANDELVTYSLGKFGQRALDFYSIHVTRESNHPVKPLEQIG |
| substitution | GNSCASGPVGKALSDACMGAVASFLTKYQDIILEHQKVIKKNEKRLANLKDIAS |
| of A708K, a | ANGLAFPKITLPPQPHTKEGIEAYNNVVAQIVIWVNLNLWQKLKIGRDEAKPLQ |
| deletion of P | RLKGFPSFPLVERQANEVDWWDMVCNVKKLINEKKEDGKVFWQNLAGYKRQEAL |
| at position | RPYLSSEEDRKKGKKFARYQFGDLLLHLEKKHGEDWGKVYDEAWERIDKKVEGL |
| 793 and a | SKHIKLEEERRSEDAQSKAALTDWLRAKASFVIEGLKEADKDEFKRCELKLQKW |
| substitution | YGDLRGKPFAIEAENSILDISGFSKQYNCAFIWQKDGVKKLNLYLIINYFKGGK |
| of M771N of | LRFKKIKPEAFEANRFYTVINKKSGEIVPMEVNFNFDDPNLIILPLAFGKRQGR |
| SEQ ID NO: | EFIWNDLLSLETGSLKLANGRVIEKTLYNRRTRQDEPALFVALTFERREVLDSS |
| 2. | NIKPMNLIGIDRGENIPAVIALTDPEGCPLSRFKDSLGNPTHILRIGESYKEKQ |
| | RTIQAKKEVEQRRAGGYSRKYASKAKNLADDMVRNTARDLLYYAVTQDAMLIFE |
| | NLSRGFGRQGKRTFNAERQYTRMEDWLTAKLAYEGLSKTYLSKTLAQYTSKTCS |
| | NCGFTITSADYDRVLEKLKKTATGWMTTINGKELKVEGQITYYNRYKRQNVVKD |
| | LSVELDRLSEESVNNDISSWTKGRSGEALSLLKKRFSHRPVQEKFVCLNCGFET |
| | HADEQAALNIARSWLFLRSQEYKKYQTNKTTGNTDKRAFVETWQSFYRKKLKEV |
| | WKPAV (SEQ ID NO: 60) |
| substitution | MQEIKRINKIRRRLVKDSNIKKAGKTGPMKTLLVRVMTPDLRERLENLRKKPEN |
| of A708K, a | IPQPISNTSRANLNKLLTDYTEMKKAILHVYWEEFQKDPVGLMSRVAQPAPKNI |
| deletion of P | DQRKLIPVKDGNERLTSSGFACSQCCQPLYVYKLEQVNDKGKPHTNYFGRCNVS |
| at position | EHERLILLSPHKPEANDELVTYSLGKFGQRALDFYSIHVTRESNHPVKPLEQIG |
| 793 and a | GNSCASGPVGKALSDACMGAVASFLTKYQDIILEHQKVIKKNEKRLANLKDIAS |
| substitution | ANGLAFPKITLPPQPHTKEGIEAYNNVVAQIVIWVNLNLWQKLKIGRDEAKPLQ |
| of E386S of | RLKGFPSFPLVERQANEVDWWDMVCNVKKLINEKKEDGKVFWQNLAGYKRQEAL |
| SEQ ID NO: | LPYLSSESDRKKGKKFARYQFGDLLLHLEKKHGEDWGKVYDEAWERIDKKVEGL |
| 2. | SKHIKLEEERRSEDAQSKAALTDWLRAKASFVIEGLKEADKDEFCRCELKLQKW |
| | YGDLRGKPFAIEAENSILDISGFSKQYNCAFIWQKDGVKKLNLYLIINYFKGGK |
| | LRFKKIKPEAFEANRFYTVINKKSGEIVPMEVNFNFDDPNLIILPLAFGKRQGR |
| | EFIWNDLLSLETGSLKLANGRVIEKTLYNRRTRQDEPALFVALTFERREVLDSS |
| | NIKPMNLIGIDRGENIPAVIALTDPEGCPLSRFKDSLGNPTHILRIGESYKEKQ |
| | RTIQAKKEVEQRRAGGYSRKYASKAKNLADDMVRNTARDLLYYAVTQDAMLIFE |
| | NLSRGFGRQGKRTFMAERQYTRMEDWLTAKLAYEGLSKTYLSKTLAQYTSKTCS |
| | NCGFTITSADYDRVLEKLKKTATGWMTTINGKELKVEGQITYYNRYKRQNVVKD |
| | LSVELDRLSEESVNNDISSWTKGRSGEALSLLKKRFSHRPVQEKFVCLNCGFET |
| | HADEQAALNIARSWLFLRSQEYKKYQTNKTTGNTDKRAFVETWQSFYRKKLKEV |
| | WKPAV (SEQ ID NO: 61) |
| substitution | MQEIKRINKIRRRLVKDSNIKKAGKTGPMKTLLVRVMTPDLRERLENLRKKPEN |
| of L379R, a | IPQPISNTSRANLNKLLTDYTEMKKAILHVYWEEFQKDPVGLMSRVAQPAPKNI |
| substitution | DQRKLIPVKDGNERLTSSGFACSQCCQPLYVYKLEQVNDKGKPHTNYFGRCNVS |
| of C477K, a | EHERLILLSPHKPEANDELVTYSLGKFGQRALDFYSIHVTRESNHPVKPLEQIG |
| substitution | GNSCASGPVGKALSDACMGAVASFLTKYQDIILEHQKVIKKNEKRLANLKDIAS |
| of A708K | ANGLAFPKITLPPQPHTKEGIEAYNNVVAQIVIWVNLNLWQKLKIGRDEAKPLQ |
| and a | RLKGFPSFPLVERQANEVDWWDMVCNVKKLINEKKEDGKVFWQNLAGYKRQEAL |
| deletion of P | RPYLSSEEDRKKGKKFARYQFGDLLLHLEKKHGEDWGKVYDEAWERIDKKVEGL |
| at position | SKHIKLEEERRSEDAQSKAALTDWLRAKASFVIEGLKEADKDEFKRCELKLQKW |
| 793 of SEQ | YGDLRGKPFAIEAENSILDISGFSKQYNCAFIWQKDGVKKLNLYLIINYFKGGK |
| ID NO: 2. | LRFKKIKPEAFEANRFYTVINKKSGEIVPMEVNFNFDDPNLIILPLAFGKRQGR |
| | EFIWNDLLSLETGSLKLANGRVIEKTLYNRRTRQDEPALFVALTFERREVLDSS |
| | NIKPMNLIGIDRGENIPAVIALTDPEGCPLSRFKDSLGNPTHILRIGESYKEKQ |
| | RTIQAKKEVEQRRAGGYSRKYASKAKNLADDMVRNTARDLLYYAVTQDAMLIFE |
| | NLSRGFGRQGKRTFMAERQYTRMEDWLTAKLAYEGLSKTYLSKTLAQYTSKTCS |
| | NCGFTITSADYDRVLEKLKKTATGWMTTINGKELKVEGQITYYNRYKRQNVVKD |
| | LSVELDRLSEESVNNDISSWTKGRSGEALSLLKKRFSHRPVQEKFVCLNCGFET |
| | HADEQAALNIARSWLFLRSQEYKKYQTNKTTGNTDKRAFVETWQSFYRKKLKEV |
| | WKPAV (SEQ ID NO: 62) |
| substitution | MQEIKRINKIRRRLVKDSNIKKAGKTGPMKTLLVRVMTPDLRERLENLRKKPEN |
| of L792D of | IPQPISNTSRANLNKLLTDYTEMKKAILHVYWEEFQKDPVGLMSRVAQPAPKNI |
| SEQ ID NO: | DQRKLIPVKDGNERLTSSGFACSQCCQPLYVYKLEQVNDKGKPHTNYFGRCNVS |
| 2. | EHERLILLSPHKPEANDELVTYSLGKFGQRALDFYSIHVTRESNHPVKPLEQIG |
| | GNSCASGPVGKALSDACMGAVASFLTKYQDIILEHQKVIKKNEKRLANLKDIAS |
| | ANGLAFPKITLPPQPHTKEGIEAYNNVVAQIVIWVNLNLWQKLKIGRDEAKPLQ |
| | RLKGFPSFPLVERQANEVDWWDMVCNVKKLINEKKEDGKVFWQNLAGYKRQEAL |
| | LPYLSSEEDRKKGKKFARYQFGDLLLHLEKKHGEDWGKVYDEAWERIDKKVEGL |
| | SKHIKLEEERRSEDAQSKAALTDWLRAKASFVIEGLKEADKDEFCRCELKLQKW |
| | YGDLRGKPFAIEAENSILDISGFSKQYNCAFIWQKDGVKKLNLYLIINYFKGGK |
| | LRFKKIKPEAFEANRFYTVINKKSGEIVPMEVNFNFDDPNLIILPLAFGKRQGR |
| | EFIWNDLLSLETGSLKLANGRVIEKTLYNRRTRQDEPALFVALTFERREVLDSS |
| | NIKPMNLIGIDRGENIPAVIALTDPEGCPLSRFKDSLGNPTHILRIGESYKEKQ |
| | RTIQAAKEVEQRRAGGYSRKYASKAKNLADDMVRNTARDLLYYAVTQDAMLIFE |
| | NLSRGFGRQGKRTFMAERQYTRMEDWLTAKLAYEGDPSKTYLSKTLAQYTSKTC |
| | SNCGFTITSADYDRVLEKLKKTATGWMTTINGKELKVEGQITYYNRYKRQNVVK |
| | DLSVELDRLSEESVNNDISSWTKGRSGEALSLLKKRFSHRPVQEKFVCLNCGFE |
| | THADEQAALNIARSWLFLRSQEYKKYQTNKTTGNTDKRAFVETWQSFYRKKLKE |
| | VWKPAV (SEQ ID NO: 63) |
| substitution | MQEIKRINKIRRRLVKDSNIKKAGKTGPMKTLLVRVMTPDLRERLENLRKKPEN |
| of G791F of | IPQPISNTSRANLNKLLTDYTEMKKAILHVYWEEFQKDPVGLMSRVAQPAPKNI |
| SEQ ID NO: | DQRKLIPVKDGNERLTSSGFACSQCCQPLYVYKLEQVNDKGKPHTNYFGRCNVS |
| 2. | EHERLILLSPHKPEANDELVTYSLGKFGQRALDFYSIHVTRESNHPVKPLEQIG |
| | GNSCASGPVGKALSDACMGAVASFLTKYQDIILEHQKVIKKNEKRLANLKDIAS |
| | ANGLAFPKITLPPQPHTKEGIEAYNNVVAQIVIWVNLNLWQKLKIGRDEAKPLQ |
| | RLKGFPSFPLVERQANEVDWWDMVCNVKKLINEKKEDGKVFWQNLAGYKRQEAL |
| | LPYLSSEEDRKKGKKFARYQFGDLLLHLEKKHGEDWGKVYDEAWERIDKKVEGL |
| | SKHIKLEEERRSEDAQSKAALTDWLRAKASFVIEGLKEADKDEFCRCELKLQKW |
| | YGDLRGKPFAIEAENSILDISGFSKQYNCAFIWQKDGVKKLNLYLIINYFKGGK |
| | LRFKKIKPEAFEANRFYTVINKKSGEIVPMEVNFNFDDPNLIILPLAFGKRQGR |
| | EFIWNDLLSLETGSLKLANGRVIEKTLYNRRTRQDEPALFVALTFERREVLDSS |
| | NIKPMNLIGIDRGENIPAVIALTDPEGCPLSRFKDSLGNPTHILRIGESYKEKQ |
| | RTIQAAKEVEQRRAGGYSRKYASKAKNLADDMVRNTARDLLYYAVTQDAMLIFE |
| | NLSRGFGRQGKRTFMAERQYTRMEDWLTAKLAYEFLPSKTYLSKTLAQYTSKTC |
| | SNCGFTITSADYDRVLEKLKKTATGWMTTINGKELKVEGQITYYNRYKRQNVVK |
| | DLSVELDRLSEESVNNDISSWTKGRSGEALSLLKKRFSHRPVQEKFVCLNCGFE |
| | THADEQAALNIARSWLFLRSQEYKKYQTNKTTGNTDKRAFVETWQSFYRKKLKE |
| | VWKPAV (SEQ ID NO: 64) |
| substitution | MQEIKRINKIRRRLVKDSNIKKAGKTGPMKTLLVRVMTPDLRERLENLRKKPEN |
| of A708K, a | IPQPISNTSRANLNKLLTDYTEMKKAILHVYWEEFQKDPVGLMSRVAQPAPKNI |
| deletion of P | DQRKLIPVKDGNERLTSSGFACSQCCQPLYVYKLEQVNDKGKPHTNYFGRCNVS |
| at position | EHERLILLSPHKPEANDELVTYSLGKFGQRALDFYSIHVTRESNHPVKPLEQIG |
| 793 and a | GNSCASGPVGKALSDACMGAVASFLTKYQDIILEHQKVIKKNEKRLANLKDIAS |
| substitution | ANGLAFPKITLPPQPHTKEGIEAYNNVVAQIVIWVNLNLWQKLKIGRDEAKPLQ |
| of A739V of | RLKGFPSFPLVERQANEVDWWDMVCNVKKLINEKKEDGKVFWQNLAGYKRQEAL |
| SEQ ID NO: | LPYLSSEEDRKKGKKFARYQFGDLLLHLEKKHGEDWGKVYDEAWERIDKKVEGL |
| 2. | SKHIKLEEERRSEDAQSKAALTDWLRAKASFVIEGLKEADKDEFCRCELKLQKW |
| | YGDLRGKPFAIEAENSILDISGFSKQYNCAFIWQKDGVKKLNLYLIINYFKGGK |
| | LRFKKIKPEAFEANRFYTVINKKSGEIVPMEVNFNFDDPNLIILPLAFGKRQGR |
| | EFIWNDLLSLETGSLKLANGRVIEKTLYNRRTRQDEPALFVALTFERREVLDSS |
| | NIKPMNLIGIDRGENIPAVIALTDPEGCPLSRFKDSLGNPTHILRIGESYKEKQ |
| | RTIQAKKEVEQRRAGGYSRKYASKAKNLADDMVRNTVRDLLYYAVTQDAMLIFE |
| | NLSRGFGRQGKRTFMAERQYTRMEDWLTAKLAYEGLSKTYLSKTLAQYTSKTCS |
| | NCGFTITSADYDRVLEKLKKTATGWMTTINGKELKVEGQITYYNRYKRQNVVKD |
| | LSVELDRLSEESVNNDISSWTKGRSGEALSLLKKRFSHRPVQEKFVCLNCGFET |
| | HADEQAALNIARSWLFLRSQEYKKYQTNKTTGNTDKRAFVETWQSFYRKKLKEV |
| | WKPAV (SEQ ID NO: 65) |
| substitution | MQEIKRINKIRRRLVKDSNIKKAGKTGPMKTLLVRVMTPDLRERLENLRKKPEN |
| of L379R, a | IPQPISNTSRANLNKLLTDYTEMKKAILHVYWEEFQKDPVGLMSRVAQPAPKNI |
| substitution | DQRKLIPVKDGNERLTSSGFACSQCCQPLYVYKLEQVNDKGKPHTNYFGRCNVS |
| of A708K, a | EHERLILLSPHKPEANDELVTYSLGKFGQRALDFYSIHVTRESNHPVKPLEQIG |
| deletion of P | GNSCASGPVGKALSDACMGAVASFLTKYQDIILEHQKVIKKNEKRLANLKDIAS |
| at position | ANGLAFPKITLPPQPHTKEGIEAYNNVVAQIVIWVNLNLWQKLKIGRDEAKPLQ |
| 793 and a | RLKGFPSFPLVERQANEVDWWDMVCNVKKLINEKKEDGKVFWQNLAGYKRQEAL |
| substitution | RPYLSSEEDRKKGKKFARYQFGDLLLHLEKKHGEDWGKVYDEAWERIDKKVEGL |
| of A739V of | SKHIKLEEERRSEDAQSKAALTDWLRAKASFVIEGLKEADKDEFCRCELKLQKW |
| SEQ ID NO: | YGDLRGKPFAIEAENSILDISGFSKQYNCAFIWQKDGVKKLNLYLIINYFKGGK |
| 2. | LRFKKIKPEAFEANRFYTVINKKSGEIVPMEVNFNFDDPNLIILPLAFGKRQGR |
| | EFIWNDLLSLETGSLKLANGRVIEKTLYNRRTRQDEPALFVALTFERREVLDSS |
| | NIKPMNLIGIDRGENIPAVIALTDPEGCPLSRFKDSLGNPTHILRIGESYKEKQ |
| | RTIQAKKEVEQRRAGGYSRKYASKAKNLADDMVRNTVRDLLYYAVTQDAMLIFE |
| | NLSRGFGRQGKRTFMAERQYTRMEDWLTAKLAYEGLSKTYLSKTLAQYTSKTCS |
| | NCGFTITSADYDRVLEKLKKTATGWMTTINGKELKVEGQITYYNRYKRQNVVKD |
| | LSVELDRLSEESVNNDISSWTKGRSGEALSLLKKRFSHRPVQEKFVCLNCGFET |
| | HADEQAALNIARSWLFLRSQEYKKYQTNKTTGNTDKRAFVETWQSFYRKKLKEV |
| | WKPAV (SEQ ID NO: 66) |
| substitution | MQEIKRINKIRRRLVKDSNIKKAGKTGPMKTLLVRVMTPDLRERLENLRKKPEN |
| of C477K, a | IPQPISNTSRANLNKLLTDYTEMKKAILHVYWEEFQKDPVGLMSRVAQPAPKNI |
| substitution | DQRKLIPVKDGNERLTSSGFACSQCCQPLYVYKLEQVNDKGKPHTNYFGRCNVS |
| of A708K | EHERLILLSPHKPEANDELVTYSLGKFGQRALDFYSIHVTRESNHPVKPLEQIG |
| and a | GNSCASGPVGKALSDACMGAVASFLTKYQDIILEHQKVIKKNEKRLANLKDIAS |
| deletion of P | ANGLAFPKITLPPQPHTKEGIEAYNNVVAQIVIWVNLNLWQKLKIGRDEAKPLQ |
| at position | RLKGFPSFPLVERQANEVDWWDMVCNVKKLINEKKEDGKVFWQNLAGYKRQEAL |
| 793 of SEQ | LPYLSSEEDRKKGKKFARYQFGDLLLHLEKKHGEDWGKVYDEAWERIDKKVEGL |
| ID NO: 2. | SKHIKLEEERRSEDAQSKAALTDWLRAKASFVIEGLKEADKDEFKRCELKLQKW |
| | YGDLRGKPFAIEAENSILDISGFSKQYNCAFIWQKDGVKKLNLYLIINYFKGGK |
| | LRFKKIKPEAFEANRFYTVINKKSGEIVPMEVNFNFDDPNLIILPLAFGKRQGR |
| | EFIWNDLLSLETGSLKLANGRVIEKTLYNRRTRQDEPALFVALTFERREVLDSS |
| | NIKPMNLIGIDRGENIPAVIALTDPEGCPLSRFKDSLGNPTHILRIGESYKEKQ |
| | RTIQAKKEVEQRRAGGYSRKYASKAKNLADDMVRNTARDLLYYAVTQDAMLIFE |
| | NLSRGFGRQGKRTFMAERQYTRMEDWLTAKLAYEGLSKTYLSKTLAQYTSKTCS |
| | NCGFTITSADYDRVLEKLKKTATGWMTTINGKELKVEGQITYYNRYKRQNVVKD |
| | LSVELDRLSEESVNNDISSWTKGRSGEALSLLKKRFSHRPVQEKFVCLNCGFET |
| | HADEQAALNIARSWLFLRSQEYKKYQTNKTTGNTDKRAFVETWQSFYRKKLKEV |
| | WKPAV (SEQ ID NO: 67) |
| substitution | MQEIKRINKIRRRLVKDSNIKKAGKTGPMKTLLVRVMTPDLRERLENLRKKPEN |
| of L249I and | IPQPISNTSRANLNKLLTDYTEMKKAILHVYWEEFQKDPVGLMSRVAQPAPKNI |
| a substitution | DQRKLIPVKDGNERLTSSGFACSQCCQPLYVYKLEQVNDKGKPHTNYFGRCNVS |
| of M771N of | EHERLILLSPHKPEANDELVTYSLGKFGQRALDFYSIHVTRESNHPVKPLEQIG |
| 2. | ANGLAFPKITLPPQPHTKEGIEAYNNVVAQIVIWVNLNLWQKLKIGRDEAKPLQ |
| | RLKGFPSFPLVERQANEVDWWDMVCNVKKLINEKKEDGKVFWQNLAGYKRQEAL |
| | LPYLSSEEDRKKGKKFARYQFGDLLLHLEKKHGEDWGKVYDEAWERIDKKVEGL |
| | SKHIKLEEERRSEDAQSKAALTDWLRAKASFVIEGLKEADKDEFCRCELKLQKW |
| | YGDLRGKPFAIEAENSILDISGFSKQYNCAFIWQKDGVKKLNLYLIINYFKGGK |
| | LRFKKIKPEAFEANRFYTVINKKSGEIVPMEVNFNFDDPNLIILPLAFGKRQGR |
| | EFIWNDLLSLETGSLKLANGRVIEKTLYNRRTRQDEPALFVALTFERREVLDSS |
| | NIKPMNLIGIDRGENIPAVIALTDPEGCPLSRFKDSLGNPTHILRIGESYKEKQ |
| | RTIQAAKEVEQRRAGGYSRKYASKAKNLADDMVRNTARDLLYYAVTQDAMLIFE |
| | NLSRGFGRQGKRTFNAERQYTRMEDWLTAKLAYEGLPSKTYLSKTLAQYTSKTC |
| | SNCGFTITSADYDRVLEKLKKTATGWMTTINGKELKVEGQITYYNRYKRQNVVK |
| | DLSVELDRLSEESVNNDISSWTKGRSGEALSLLKKRFSHRPVQEKFVCLNCGFE |
| | THADEQAALNIARSWLFLRSQEYKKYQTNKTTGNTDKRAFVETWQSFYRKKLKE |
| | VWKPAV (SEQ ID NO: 68) |
| substitution | MQEIKRINKIRRRLVKDSNIKKAGKTGPMKTLLVRVMTPDLRERLENLRKKPEN |
| of V747K of | IPQPISNTSRANLNKLLTDYTEMKKAILHVYWEEFQKDPVGLMSRVAQPAPKNI |
| SEQ ID NO: | DQRKLIPVKDGNERLTSSGFACSQCCQPLYVYKLEQVNDKGKPHTNYFGRCNVS |
| 2. | EHERLILLSPHKPEANDELVTYSLGKFGQRALDFYSIHVTRESNHPVKPLEQIG |
| | GNSCASGPVGKALSDACMGAVASFLTKYQDIILEHQKVIKKNEKRLANLKDIAS |
| | ANGLAFPKITLPPQPHTKEGIEAYNNVVAQIVIWVNLNLWQKLKIGRDEAKPLQ |
| | RLKGFPSFPLVERQANEVDWWDMVCNVKKLINEKKEDGKVFWQNLAGYKRQEAL |
| | LPYLSSEEDRKKGKKFARYQFGDLLLHLEKKHGEDWGKVYDEAWERIDKKVEGL |
| | SKHIKLEEERRSEDAQSKAALTDWLRAKASFVIEGLKEADKDEFCRCELKLQKW |
| | YGDLRGKPFAIEAENSILDISGFSKQYNCAFIWQKDGVKKLNLYLIINYFKGGK |
| | LRFKKIKPEAFEANRFYTVINKKSGEIVPMEVNFNFDDPNLIILPLAFGKRQGR |
| | EFIWNDLLSLETGSLKLANGRVIEKTLYNRRTRQDEPALFVALTFERREVLDSS |
| | NIKPMNLIGIDRGENIPAVIALTDPEGCPLSRFKDSLGNPTHILRIGESYKEKQ |
| | RTIQAAKEVEQRRAGGYSRKYASKAKNLADDMVRNTARDLLYYAKTQDAMLIFE |
| | NLSRGFGRQGKRTFMAERQYTRMEDWLTAKLAYEGLPSKTYLSKTLAQYTSKTC |
| | SNCGFTITSADYDRVLEKLKKTATGWMTTINGKELKVEGQITYYNRYKRQNVVK |
| | DLSVELDRLSEESVNNDISSWTKGRSGEALSLLKKRFSHRPVQEKFVCLNCGFE |
| | THADEQAALNIARSWLFLRSQEYKKYQTNKTTGNTDKRAFVETWQSFYRKKLKE |
| | VWKPAV (SEQ ID NO: 69) |
| substitution | MQEIKRINKIRRRLVKDSNIKKAGKTGPMKTLLVRVMTPDLRERLENLRKKPEN |
| of L379R, a | IPQPISNTSRANLNKLLTDYTEMKKAILHVYWEEFQKDPVGLMSRVAQPAPKNI |
| substitution | DQRKLIPVKDGNERLTSSGFACSQCCQPLYVYKLEQVNDKGKPHTNYFGRCNVS |
| of C477K, a | EHERLILLSPHKPEANDELVTYSLGKFGQRALDFYSIHVTRESNHPVKPLEQIG |
| substitution | GNSCASGPVGKALSDACMGAVASFLTKYQDIILEHQKVIKKNEKRLANLKDIAS |
| of A708K, a | ANGLAFPKITLPPQPHTKEGIEAYNNVVAQIVIWVNLNLWQKLKIGRDEAKPLQ |
| deletion of P | RLKGFPSFPLVERQANEVDWWDMVCNVKKLINEKKEDGKVFWQNLAGYKRQEAL |
| at position | RPYLSSEEDRKKGKKFARYQFGDLLLHLEKKHGEDWGKVYDEAWERIDKKVEGL |
| 793 and a | SKHIKLEEERRSEDAQSKAALTDWLRAKASFVIEGLKEADKDEFKRCELKLQKW |
| substitution | YGDLRGKPFAIEAENSILDISGFSKQYNCAFIWQKDGVKKLNLYLIINYFKGGK |
| of M779N of | LRFKKIKPEAFEANRFYTVINKKSGEIVPMEVNFNFDDPNLIILPLAFGKRQGR |
| SEQ ID NO: | EFIWNDLLSLETGSLKLANGRVIEKTLYNRRTRQDEPALFVALTFERREVLDSS |
| 2. | NIKPMNLIGIDRGENIPAVIALTDPEGCPLSRFKDSLGNPTHILRIGESYKEKQ |
| | RTIQAKKEVEQRRAGGYSRKYASKAKNLADDMVRNTARDLLYYAVTQDAMLIFE |
| | NLSRGFGRQGKRTFMAERQYTRNEDWLTAKLAYEGLSKTYLSKTLAQYTSKTCS |
| | NCGFTITSADYDRVLEKLKKTATGWMTTINGKELKVEGQITYYNRYKRQNVVKD |
| | LSVELDRLSEESVNNDISSWTKGRSGEALSLLKKRFSHRPVQEKFVCLNCGFET |
| | HADEQAALNIARSWLFLRSQEYKKYQTNKTTGNTDKRAFVETWQSFYRKKLKEV |
| | WKPAV (SEQ ID NO: 70) |
| L379R, | MQEIKRINKIRRRLVKDSNIKKAGKTGPMKTLLVRVMTPDLRERLENLRKKPEN |
| F755M | IPQPISNTSRANLNKLLTDYTEMKKAILHVYWEEFQKDPVGLMSRVAQPAPKNI |
| | DQRKLIPVKDGNERLTSSGFACSQCCQPLYVYKLEQVNDKGKPHTNYFGRCNVS |
| | EHERLILLSPHKPEANDELVTYSLGKFGQRALDFYSIHVTRESNHPVKPLEQIG |
| | GNSCASGPVGKALSDACMGAVASFLTKYQDIILEHQKVIKKNEKRLANLKDIAS |
| | ANGLAFPKITLPPQPHTKEGIEAYNNVVAQIVIWVNLNLWQKLKIGRDEAKPLQ |
| | RLKGFPSFPLVERQANEVDWWDMVCNVKKLINEKKEDGKVFWQNLAGYKRQEAL |
| | LPYLSSEEDRKKGKKFARYQFGDLLLHLEKKHGEDWGKVYDEAWERIDKKVEGL |
| | SKHIKLEEERRSEDAQSKAALTDWLRAKASFVIEGLKEADKDEFCRCELKLQKW |
| | YGDLRGKPFAIEAENSILDISGFSKQYNCAFIWQKDGVKKLNLYLIINYFKGGK |
| | LRFKKIKPEAFEANRFYTVINKKSGEIVPMEVNFNFDDPNLIILPLAFGKRQGR |
| | EFIWNDLLSLETGSLKLANGRVIEKTLYNRRTRQDEPALFVALTFERREVLDSS |
| | NIKPMNLIGIDRGENIPAVIALTDPEGCPLSRFKDSLGNPTHILRIGESYKEKQ |
| | RTIQAAKEVEQRRAGGYSRKYASKAKNLADDMVRNTARDLLYYAVTQDAMLIME |
| | NLSRGFGRQGKRTFMAERQYTRMEDWLTAKLAYEGLPSKTYLSKTLAQYTSKTC |
| | SNCGFTITSADYDRVLEKLKKTATGWMTTINGKELKVEGQITYYNRYKRQNVVK |
| | DLSVELDRLSEESVNNDISSWTKGRSGEALSLLKKRFSHRPVQEKFVCLNCGFE |
| | THADEQAALNIARSWLFLRSQEYKKYQTNKTTGNTDKRAFVETWQSFYRKKLKE |
| | VWKPAV (SEQ ID NO: 71) |
| 429: | MQEIKRINKIRRRLVKDSNIKKAGKTGPMKTLLVRVMTPDLRERLENLRKKPEN |
| L379R, | IPQPISNTSRANLNKLLTDYTEMKKAILHVYWEEFQKDPVGLMSRVAQPAPKNI |
| A708K, | DQRKLIPVKDGNERLTSSGFACSQCCQPLYVYKLEQVNDKGKPHTNYFGRCNVS |
| P793_, | EHERLILLSPHKPEANDELVTYSLGKFGQRALDFYSIHVTRESNHPVKPLEQIG |
| Y857R | GNSCASGPVGKALSDACMGAVASFLTKYQDIILEHQKVIKKNEKRLANLKDIAS |
| | ANGLAFPKITLPPQPHTKEGIEAYNNVVAQIVIWVNLNLWQKLKIGRDEAKPLQ |
| | RLKGFPSFPLVERQANEVDWWDMVCNVKKLINEKKEDGKVFWQNLAGYKRQEAL |
| | RPYLSSEEDRKKGKKFARYQFGDLLLHLEKKHGEDWGKVYDEAWERIDKKVEGL |
| | SKHIKLEEERRSEDAQSKAALTDWLRAKASFVIEGLKEADKDEFCRCELKLQKW |
| | YGDLRGKPFAIEAENSILDISGFSKQYNCAFIWQKDGVKKLNLYLIINYFKGGK |
| | LRFKKIKPEAFEANRFYTVINKKSGEIVPMEVNFNFDDPNLIILPLAFGKRQGR |
| | EFIWNDLLSLETGSLKLANGRVIEKTLYNRRTRQDEPALFVALTFERREVLDSS |
| | NIKPMNLIGIDRGENIPAVIALTDPEGCPLSRFKDSLGNPTHILRIGESYKEKQ |
| | RTIQAKKEVEQRRAGGYSRKYASKAKNLADDMVRNTARDLLYYAVTQDAMLIFE |
| | NLSRGFGRQGKRTFMAERQYTRMEDWLTAKLAYEGLSKTYLSKTLAQYTSKTCS |
| | NCGFTITSADYDRVLEKLKKTATGWMTTINGKELKVEGQITYYNRRKRQNVVKD |
| | LSVELDRLSEESVNNDISSWTKGRSGEALSLLKKRFSHRPVQEKFVCLNCGFET |
| | HADEQAALNIARSWLFLRSQEYKKYQTNKTTGNTDKRAFVETWQSFYRKKLKEV |
| | WKPAV (SEQ ID NO: 72) |
| 430 | MQEIKRINKIRRRLVKDSNIKKAGKTGPMKTLLVRVMTPDLRERLENLRKKPEN |
| L379R, | IPQPISNTSRANLNKLLTDYTEMKKAILHVYWEEFQKDPVGLMSRVAQPAPKNI |
| A708K, | DQRKLIPVKDGNERLTSSGFACSQCCQPLYVYKLEQVNDKGKPHTNYFGRCNVS |
| P793_, | EHERLILLSPHKPEANDELVTYSLGKFGQRALDFYSIHVTRESNHPVKPLEQIG |
| Y857R, | GNSCASGPVGKALSDACMGAVASFLTKYQDIILEHQKVIKKNEKRLANLKDIAS |
| I658V | ANGLAFPKITLPPQPHTKEGIEAYNNVVAQIVIWVNLNLWQKLKIGRDEAKPLQ |
| | RLKGFPSFPLVERQANEVDWWDMVCNVKKLINEKKEDGKVFWQNLAGYKRQEAL |
| | RPYLSSEEDRKKGKKFARYQFGDLLLHLEKKHGEDWGKVYDEAWERIDKKVEGL |
| | SKHIKLEEERRSEDAQSKAALTDWLRAKASFVIEGLKEADKDEFCRCELKLQKW |
| | YGDLRGKPFAIEAENSILDISGFSKQYNCAFIWQKDGVKKLNLYLIINYFKGGK |
| | LRFKKIKPEAFEANRFYTVINKKSGEIVPMEVNFNFDDPNLIILPLAFGKRQGR |
| | EFIWNDLLSLETGSLKLANGRVIEKTLYNRRTRQDEPALFVALTFERREVLDSS |
| | NIKPMNLIGVDRGENIPAVIALTDPEGCPLSRFKDSLGNPTHILRIGESYKEKQ |
| | RTIQAKKEVEQRRAGGYSRKYASKAKNLADDMVRNTARDLLYYAVTQDAMLIFE |
| | NLSRGFGRQGKRTFMAERQYTRMEDWLTAKLAYEGLSKTYLSKTLAQYTSKTCS |
| | NCGFTITSADYDRVLEKLKKTATGWMTTINGKELKVEGQITYYNRRKRQNVVKD |
| | LSVELDRLSEESVNNDISSWTKGRSGEALSLLKKRFSHRPVQEKFVCLNCGFET |
| | HADEQAALNIARSWLFLRSQEYKKYQTNKTTGNTDKRAFVETWQSFYRKKLKEV |
| | WKPAV (SEQ ID NO: 73) |
| 431 | MQEIKRINKIRRRLVKDSNIKKAGKTGPMKTLLVRVMTPDLRERLENLRKKPEN |
| L379R, | IPQPISNTSRANLNKLLTDYTEMKKAILHVYWEEFQKDPVGLMSRVAQPAPKNI |
| A708K, | DQRKLIPVKDGNERLTSSGFACSQCCQPLYVYKLEQVNDKGKPHTNYFGRCNVS |
| P793_, | EHERLILLSPHKPEANDELVTYSLGKFGQRALDFYSIHVTRESNHPVKPLEQIG |
| Y857R, | GNSCASGPVGKALSDACMGAVASFLTKYQDIILEHQKVIKKNEKRLANLKDIAS |
| I658V, | ANGLAFPKITLPPQPHTKEGIEAYNNVVAQIVIWVNLNLWQKLKIGRDEAKPLQ |
| E386N | RLKGFPSFPLVERQANEVDWWDMVCNVKKLINEKKEDGKVFWQNLAGYKRQEAL |
| | RPYLSSENDRKKGKKFARYQFGDLLLHLEKKHGEDWGKVYDEAWERIDKKVEGL |
| | SKHIKLEEERRSEDAQSKAALTDWLRAKASFVIEGLKEADKDEFCRCELKLQKW |
| | YGDLRGKPFAIEAENSILDISGFSKQYNCAFIWQKDGVKKLNLYLIINYFKGGK |
| | LRFKKIKPEAFEANRFYTVINKKSGEIVPMEVNFNFDDPNLIILPLAFGKRQGR |
| | EFIWNDLLSLETGSLKLANGRVIEKTLYNRRTRQDEPALFVALTFERREVLDSS |
| | NIKPMNLIGVDRGENIPAVIALTDPEGCPLSRFKDSLGNPTHILRIGESYKEKQ |
| | RTIQAKKEVEQRRAGGYSRKYASKAKNLADDMVRNTARDLLYYAVTQDAMLIFE |
| | NLSRGFGRQGKRTFMAERQYTRMEDWLTAKLAYEGLSKTYLSKTLAQYTSKTCS |
| | NCGFTITSADYDRVLEKLKKTATGWMTTINGKELKVEGQITYYNRRKRQNVVKD |
| | LSVELDRLSEESVNNDISSWTKGRSGEALSLLKKRFSHRPVQEKFVCLNCGFET |
| | HADEQAALNIARSWLFLRSQEYKKYQTNKTTGNTDKRAFVETWQSFYRKKLKEV |
| | WKPAV (SEQ ID NO: 74) |
| 432 | MQEIKRINKIRRRLVKDSNTKKAGKTGPMKTLLVRVMTPDLRERLENLRKKPEN |
| L379R, | IPQPISNTSRANLNKLLTDYTEMKKAILHVYWEEFQKDPVGLMSRVAQPAPKNI |
| A708K, | DQRKLIPVKDGNERLTSSGFACSQCCQPLYVYKLEQVNDKGKPHTNYFGRCNVS |
| P793_, | EHERLILLSPHKPEANDELVTYSLGKFGQRALDFYSIHVTRESNHPVKPLEQIG |
| Y857R, | GNSCASGPVGKALSDACMGAVASFLTKYQDIILEHQKVIKKNEKRLANLKDIAS |
| I658V, | ANGLAFPKITLPPQPHTKEGIEAYNNVVAQIVIWVNLNLWQKLKIGRDEAKPLQ |
| L404K | RLKGFPSFPLVERQANEVDWWDMVCNVKKLINEKKEDGKVFWQNLAGYKRQEAL |
| | RPYLSSEEDRKKGKKFARYQFGDLLKHLEKKHGEDWGKVYDEAWERIDKKVEGL |
| | SKHIKLEEERRSEDAQSKAALTDWLRAKASFVIEGLKEADKDEFCRCELKLQKW |
| | YGDLRGKPFAIEAENSILDISGFSKQYNCAFIWQKDGVKKLNLYLIINYFKGGK |
| | LRFKKIKPEAFEANRFYTVINKKSGEIVPMEVNFNFDDPNLIILPLAFGKRQGR |
| | EFIWNDLLSLETGSLKLANGRVIEKTLYNRRTRQDEPALFVALTFERREVLDSS |
| | NIKPMNLIGVDRGENIPAVIALTDPEGCPLSRFKDSLGNPTHILRIGESYKEKQ |
| | RTIQAKKEVEQRRAGGYSRKYASKAKNLADDMVRNTARDLLYYAVTQDAMLIFE |
| | NLSRGFGRQGKRTFMAERQYTRMEDWLTAKLAYEGLSKTYLSKTLAQYTSKTCS |
| | NCGFTITSADYDRVLEKLKKTATGWMTTINGKELKVEGQITYYNRRKRQNVVKD |
| | LSVELDRLSEESVNNDISSWTKGRSGEALSLLKKRFSHRPVQEKFVCLNCGFET |
| | HADEQAALNIARSWLFLRSQEYKKYQTNKTTGNTDKRAFVETWQSFYRKKLKEV |
| | WKPAV (SEQ ID NO: 75) |
| 433 | MQEIKRINKIRRRLVKDSNTKKAGKTGPMKTLLVRVMTPDLRERLENLRKKPEN |
| L379R, | IPQPISNTSRANLNKLLTDYTEMKKAILHVYWEEFQKDPVGLMSRVAQPAPKNI |
| A708K, | DQRKLIPVKDGNERLTSSGFACSQCCQPLYVYKLEQVNDKGKPHTNYFGRCNVS |
| P793_, | EHERLILLSPHKPEANDELVTYSLGKFGQVRALDFYSIHVTRESNHPVKPLEQI |
| Y857R, | GGNSCASGPVGKALSDACMGAVASFLTKYQDIILEHQKVIKKNEKRLANLKDIA |
| I658V, | SANGLAFPKITLPPQPHTKEGIEAYNNVVAQIVIWVNLNLWQKLKIGRDEAKPL |
| \hat{ }V192 | QRLKGFPSFPLVERQANEVDWWDMVCNVKKLINEKKEDGKVFWQNLAGYKRQEA |
| | LRPYLSSEEDRKKGKKFARYQFGDLLLHLEKKHGEDWGKVYDEAWERIDKKVEG |
| | LSKHIKLEEERRSEDAQSKAALTDWLRAKASFVIEGLKEADKDEFCRCELKLQK |
| | WYGDLRGKPFAIEAENSILDISGFSKQYNCAFIWQKDGVKKLNLYLIINYFKGG |
| | KLRFKKIKPEAFEANRFYTVINKKSGEIVPMEVNFNFDDPNLIILPLAFGKRQG |
| | REFIWNDLLSLETGSLKLANGRVIEKTLYNRRTRQDEPALFVALTFERREVLDS |
| | SNIKPMNLIGVDRGENIPAVIALTDPEGCPLSRFKDSLGNPTHILRIGESYKEK |
| | QRTIQAKKEVEQRRAGGYSRKYASKAKNLADDMVRNTARDLLYYAVTQDAMLIF |
| | ENLSRGFGRQGKRTFMAERQYTRMEDWLTAKLAYEGLSKTYLSKTLAQYTSKTC |
| | SNCGFTITSADYDRVLEKLKKTATGWMTTINGKELKVEGQITYYNRRKRQNVVK |
| | DLSVELDRLSEESVNNDISSWTKGRSGEALSLLKKRFSHRPVQEKFVCLNCGFE |
| | THADEQAALNIARSWLFLRSQEYKKYQTNKTTGNTDKRAFVETWQSFYRKKLKE |
| | VWKPAV (SEQ ID NO: 76) |
| 434 | MQEIKRINKIRRRLVKDSNTKKAGKTGPMKTLLVRVMTPDLRERLENLRKKPEN |
| L379R, | IPQPISNTSRANLNKLLTDYTEMKKAILHVYWEEFQKDPVGLMSRVAQPAPKNI |
| A708K, | DQRKLIPVKDGNERLTSSGFACSQCCQPLYVYKLEQVNDKGKPHTNYFGRCNVS |
| P793_, | EHERLILLSPHKPEANDELVTYSLGKFGQRALDFYSIHVTRESNHPVKPLEQIG |
| Y857R, | GNSCASGPVGKALSDACMGAVASFLTKYQDIILEHQKVIKKNEKRLANLKDIAS |
| I658V, | ANGLAFPKITLPPQPHTKEGIEAYNNVVAQIVIWVNLNLWQKLKIGRDEAKPLQ |
| L404K, | RLKGFPSFPLVERQANEVDWWDMVCNVKKLINEKKEDGKVFWQNLAGYKRQEAL |
| E386N | RPYLSSENDRKKGKKFARYQFGDLLKHLEKKHGEDWGKVYDEAWERIDKKVEGL |
| | SKHIKLEEERRSEDAQSKAALTDWLRAKASFVIEGLKEADKDEFCRCELKLQKW |
| | YGDLRGKPFAIEAENSILDISGFSKQYNCAFIWQKDGVKKLNLYLIINYFKGGK |
| | LRFKKIKPEAFEANRFYTVINKKSGEIVPMEVNFNFDDPNLIILPLAFGKRQGR |
| | EFIWNDLLSLETGSLKLANGRVIEKTLYNRRTRQDEPALFVALTFERREVLDSS |
| | NIKPMNLIGVDRGENIPAVIALTDPEGCPLSRFKDSLGNPTHILRIGESYKEKQ |
| | RTIQAKKEVEQRRAGGYSRKYASKAKNLADDMVRNTARDLLYYAVTQDAMLIFE |
| | NLSRGFGRQGKRTFMAERQYTRMEDWLTAKLAYEGLSKTYLSKTLAQYTSKTCS |
| | NCGFTITSADYDRVLEKLKKTATGWMTTINGKELKVEGQITYYNRRKRQNVVKD |
| | LSVELDRLSEESVNNDISSWTKGRSGEALSLLKKRFSHRPVQEKFVCLNCGFET |
| | HADEQAALNIARSWLFLRSQEYKKYQTNKTTGNTDKRAFVETWQSFYRKKLKEV |
| | WKPAV (SEQ ID NO: 77) |
| 435 | MQEIKRINKIRRRLVKDSNIKKAGKTGPMKTLLVRVMTPDLRERLENLRKKPEN |
| L379R, | IPQPISNTSRANLNKLLTDYTEMKKAILHVYWEEFQKDPVGLMSRVAQPAPKNI |
| A708K, | DQRKLIPVKDGNERLTSSGFACSQCCQPLYVYKLEQVNDKGKPHTNYFGRCNVS |
| P793_, | EHERLILLSPHKPEANDELVTYSLGKFGQRALDFYSIHVTRESNHPVKPLEQIG |
| Y857R, | GNSCASGPVGKALSDACMGAVASFLTKYQDIILEHQKVIKKNEKRLANLKDIAS |
| I658V, | ANGLAFPKITLPPQPHTKEGIEAYNNVVAQIVIWVNLNLWQKLKIGRDEAKPLQ |
| F399L | RLKGFPSFPLVERQANEVDWWDMVCNVKKLINEKKEDGKVFWQNLAGYKRQEAL |
| | RPYLSSEEDRKKGKKFARYQLGDLLLHLEKKHGEDWGKVYDEAWERIDKKVEGL |
| | SKHIKLEEERRSEDAQSKAALTDWLRAKASFVIEGLKEADKDEFCRCELKLQKW |
| | YGDLRGKPFAIEAENSILDISGFSKQYNCAFIWQKDGVKKLNLYLIINYFKGGK |
| | LRFKKIKPEAFEANRFYTVINKKSGEIVPMEVNFNFDDPNLIILPLAFGKRQGR |
| | EFIWNDLLSLETGSLKLANGRVIEKTLYNRRTRQDEPALFVALTFERREVLDSS |
| | NIKPMNLIGVDRGENIPAVIALTDPEGCPLSRFKDSLGNPTHILRIGESYKEKQ |
| | RTIQAKKEVEQRRAGGYSRKYASKAKNLADDMVRNTARDLLYYAVTQDAMLIFE |
| | NLSRGFGRQGKRTFMAERQYTRMEDWLTAKLAYEGLSKTYLSKTLAQYTSKTCS |
| | NCGFTITSADYDRVLEKLKKTATGWMTTINGKELKVEGQITYYNRRKRQNVVKD |
| | LSVELDRLSEESVNNDISSWTKGRSGEALSLLKKRFSHRPVQEKFVCLNCGFET |
| | HADEQAALNIARSWLFLRSQEYKKYQTNKTTGNTDKRAFVETWQSFYRKKLKEV |
| | WKPAV (SEQ ID NO: 78) |
| 436 | MQEIKRINKIRRRLVKDSNIKKAGKTGPMKTLLVRVMTPDLRERLENLRKKPEN |
| L379R, | IPQPISNTSRANLNKLLTDYTEMKKAILHVYWEEFQKDPVGLMSRVAQPAPKNI |
| A708K, | DQRKLIPVKDGNERLTSSGFACSQCCQPLYVYKLEQVNDKGKPHTNYFGRCNVS |
| P793_, | EHERLILLSPHKPEANDELVTYSLGKFGQRALDFYSIHVTRESNHPVKPLEQIG |
| Y857R, | GNSCASGPVGKALSDACMGAVASFLTKYQDIILEHQKVIKKNEKRLANLKDIAS |
| I658V, | ANGLAFPKITLPPQPHTKEGIEAYNNVVAQIVIWVNLNLWQKLKIGRDEAKPLQ |
| F399L, | RLKGFPSFPLVERQANEVDWWDMVCNVKKLINEKKEDGKVFWQNLAGYKRQEAL |
| E386N | RPYLSSENDRKKGKKFARYQLGDLLLHLEKKHGEDWGKVYDEAWERIDKKVEGL |
| | SKHIKLEEERRSEDAQSKAALTDWLRAKASFVIEGLKEADKDEFCRCELKLQKW |
| | YGDLRGKPFAIEAENSILDISGFSKQYNCAFIWQKDGVKKLNLYLIINYFKGGK |
| | LRFKKIKPEAFEANRFYTVINKKSGEIVPMEVNFNFDDPNLIILPLAFGKRQGR |
| | EFIWNDLLSLETGSLKLANGRVIEKTLYNRRTRQDEPALFVALTFERREVLDSS |
| | NIKPMNLIGVDRGENIPAVIALTDPEGCPLSRFKDSLGNPTHILRIGESYKEKQ |
| | RTIQAKKEVEQRRAGGYSRKYASKAKNLADDMVRNTARDLLYYAVTQDAMLIFE |
| | NLSRGFGRQGKRTFMAERQYTRMEDWLTAKLAYEGLSKTYLSKTLAQYTSKTCS |
| | NCGFTITSADYDRVLEKLKKTATGWMTTINGKELKVEGQITYYNRRKRQNVVKD |
| | LSVELDRLSEESVNNDISSWTKGRSGEALSLLKKRFSHRPVQEKFVCLNCGFET |
| | HADEQAALNIARSWLFLRSQEYKKYQTNKTTGNTDKRAFVETWQSFYRKKLKEV |
| | WKPAV (SEQ ID NO: 79) |
| 437 | MQEIKRINKIRRRLVKDSNIKKAGKTGPMKTLLVRVMTPDLRERLENLRKKPEN |
| L379R, | IPQPISNTSRANLNKLLTDYTEMKKAILHVYWEEFQKDPVGLMSRVAQPAPKNI |
| A708K, | DQRKLIPVKDGNERLTSSGFACSQCCQPLYVYKLEQVNDKGKPHTNYFGRCNVS |
| P793_, | EHERLILLSPHKPEANDELVTYSLGKFGQRALDFYSIHVTRESNHPVKPLEQIG |
| Y857R, | GNSCASGPVGKALSDACMGAVASFLTKYQDIILEHQKVIKKNEKRLANLKDIAS |
| I658V, | ANGLAFPKITLPPQPHTKEGIEAYNNVVAQIVIWVNLNLWQKLKIGRDEAKPLQ |
| F399L, | RLKGFPSFPLVERQANEVDWWDMVCNVKKLINEKKEDGKVFWQNLAGYKRQEAL |
| C477S | RPYLSSEEDRKKGKKFARYQLGDLLLHLEKKHGEDWGKVYDEAWERIDKKVEGL |
| | SKHIKLEEERRSEDAQSKAALTDWLRAKASFVIEGLKEADKDEFSRCELKLQKW |
| | YGDLRGKPFAIEAENSILDISGFSKQYNCAFIWQKDGVKKLNLYLIINYFKGGK |
| | LRFKKIKPEAFEANRFYTVINKKSGEIVPMEVNFNFDDPNLIILPLAFGKRQGR |
| | EFIWNDLLSLETGSLKLANGRVIEKTLYNRRTRQDEPALFVALTFERREVLDSS |
| | NIKPMNLIGVDRGENIPAVIALTDPEGCPLSRFKDSLGNPTHILRIGESYKEKQ |
| | RTIQAKKEVEQRRAGGYSRKYASKAKNLADDMVRNTARDLLYYAVTQDAMLIFE |
| | NLSRGFGRQGKRTFMAERQYTRMEDWLTAKLAYEGLSKTYLSKTLAQYTSKTCS |
| | NCGFTITSADYDRVLEKLKKTATGWMTTINGKELKVEGQITYYNRRKRQNVVKD |
| | LSVELDRLSEESVNNDISSWTKGRSGEALSLLKKRFSHRPVQEKFVCLNCGFET |
| | HADEQAALNIARSWLFLRSQEYKKYQTNKTTGNTDKRAFVETWQSFYRKKLKEV |
| | WKPAV (SEQ ID NO: 80) |
| 438: | MQEIKRINKIRRRLVKDSNIKKAGKTGPMKTLLVRVMTPDLRERLENLRKKPEN |
| L379R, | IPQPISNTSRANLNKLLTDYTEMKKAILHVYWEEFQKDPVGLMSRVAQPAPKNI |
| A708K, | DQRKLIPVKDGNERLTSSGFACSQCCQPLYVYKLEQVNDKGKPHTNYFGRCNVS |
| P793_, | EHERLILLSPHKPEANDELVTYSLGKFGQRALDFYSIHVTRESNHPVKPLEQIG |
| Y857R, | GNSCASGPVGKALSDACMGAVASFLTKYQDIILEHQKVIKKNEKRLANLKDIAS |
| I658V, | ANGLAFPKITLPPQPHTKEGIEAYNNVVAQIVIWVNLNLWQKLKIGRDEAKPLQ |
| F399L, | RLKGFPSFPLVERQANEVDWWDMVCNVKKLINEKKEDGKVFWQNLAGYKRQEAL |
| L404K | RPYLSSEEDRKKGKKFARYQLGDLLKHLEKKHGEDWGKVYDEAWERIDKKVEGL |
| | SKHIKLEEERRSEDAQSKAALTDWLRAKASFVIEGLKEADKDEFCRCELKLQKW |
| | YGDLRGKPFAIEAENSILDISGFSKQYNCAFIWQKDGVKKLNLYLIINYFKGGK |
| | LRFKKIKPEAFEANRFYTVINKKSGEIVPMEVNFNFDDPNLIILPLAFGKRQGR |
| | EFIWNDLLSLETGSLKLANGRVIEKTLYNRRTRQDEPALFVALTFERREVLDSS |
| | NIKPMNLIGVDRGENIPAVIALTDPEGCPLSRFKDSLGNPTHILRIGESYKEKQ |
| | RTIQAKKEVEQRRAGGYSRKYASKAKNLADDMVRNTARDLLYYAVTQDAMLIFE |
| | NLSRGFGRQGKRTFMAERQYTRMEDWLTAKLAYEGLSKTYLSKTLAQYTSKTCS |
| | NCGFTITSADYDRVLEKLKKTATGWMTTINGKELKVEGQITYYNRRKRQNVVKD |
| | LSVELDRLSEESVNNDISSWTKGRSGEALSLLKKRFSHRPVQEKFVCLNCGFET |
| | HADEQAALNIARSWLFLRSQEYKKYQTNKTTGNTDKRAFVETWQSFYRKKLKEV |
| | WKPAV (SEQ ID NO: 81) |
| 439: | MQEIKRINKIRRRLVKDSNIKKAGKTGPMKTLLVRVMTPDLRERLENLRKKPEN |
| L379R, | IPQPISNTSRANLNKLLTDYTEMKKAILHVYWEEFQKDPVGLMSRVAQPAPKNI |
| A708K, | DQRKLIPVKDGNERLTSSGFACSQCCQPLYVYKLEQVNDKGKPHTNYFGRCNVS |
| P793_, | EHERLILLSPHKPEANDELVTYSLGKFGQRALDFYSIHVTRESNHPVKPLEQIG |
| Y857R, | GNSCASGPVGKALSDACMGAVASFLTKYQDIILEHQKVIKKNEKRLANLKDIAS |
| I658V, | ANGLAFPKITLPPQPHTKEGIEAYNNVVAQIVIWVNLNLWQKLKIGRDEAKPLQ |
| F399L, | RLKGFPSFPLVERQANEVDWWDMVCNVKKLINEKKEDGKVFWQNLAGYKRQEAL |
| E386N, | RPYLSSENDRKKGKKFARYQLGDLLKHLEKKHGEDWGKVYDEAWERIDKKVEGL |
| C477S, | SKHIKLEEERRSEDAQSKAALTDWLRAKASFVIEGLKEADKDEFSRCELKLQKW |
| L404K | YGDLRGKPFAIEAENSILDISGFSKQYNCAFIWQKDGVKKLNLYLIINYFKGGK |
| | LRFKKIKPEAFEANRFYTVINKKSGEIVPMEVNFNFDDPNLIILPLAFGKRQGR |
| | EFIWNDLLSLETGSLKLANGRVIEKTLYNRRTRQDEPALFVALTFERREVLDSS |
| | NIKPMNLIGVDRGENIPAVIALTDPEGCPLSRFKDSLGNPTHILRIGESYKEKQ |
| | RTIQAKKEVEQRRAGGYSRKYASKAKNLADDMVRNTARDLLYYAVTQDAMLIFE |
| | NLSRGFGRQGKRTFMAERQYTRMEDWLTAKLAYEGLSKTYLSKTLAQYTSKTCS |
| | NCGFTITSADYDRVLEKLKKTATGWMTTINGKELKVEGQITYYNRRKRQNVVKD |
| | LSVELDRLSEESVNNDISSWTKGRSGEALSLLKKRFSHRPVQEKFVCLNCGFET |
| | HADEQAALNIARSWLFLRSQEYKKYQTNKTTGNTDKRAFVETWQSFYRKKLKEV |
| | WKPAV (SEQ ID NO: 82) |
| 440 | MQEIKRINKIRRRLVKDSNIKKAGKTGPMKTLLVRVMTPDLRERLENLRKKPEN |
| L379R, | IPQPISNTSRANLNKLLTDYTEMKKAILHVYWEEFQKDPVGLMSRVAQPAPKNI |
| A708K, | DQRKLIPVKDGNERLTSSGFACSQCCQPLYVYKLEQVNDKGKPHTNYFGRCNVS |
| P793_, | EHERLILLSPHKPEANDELVTYSLGKFGQRALDFYSIHVTRESNHPVKPLEQIG |
| N857R, | GNSCASGPVGKALSDACMGAVASFLTKYQDIILEHQKVIKKNEKRLANLKDIAS |
| I658V, | ANGLAFPKITLPPQPHTKEGIEAYNNVVAQIVIWVNLNLWQKLKIGRDEAKPLQ |
| F399L, | RLKGFPSFPLVERQANEVDWWDMVCNVKKLINEKKEDGKVFWQNLAGYKRQEAL |
| Y797L | RPYLSSEEDRKKGKKFARYQLGDLLLHLEKKHGEDWGKVYDEAWERIDKKVEGL |
| | SKHIKLEEERRSEDAQSKAALTDWLRAKASFVIEGLKEADKDEFCRCELKLQKW |
| | YGDLRGKPFAIEAENSILDISGFSKQYNCAFIWQKDGVKKLNLYLIINYFKGGK |
| | LRFKKIKPEAFEANRFYTVINKKSGEIVPMEVNFNFDDPNLIILPLAFGKRQGR |
| | EFIWNDLLSLETGSLKLANGRVIEKTLYNRRTRQDEPALFVALTFERREVLDSS |
| | NIKPMNLIGVDRGENIPAVIALTDPEGCPLSRFKDSLGNPTHILRIGESYKEKQ |
| | RTIQAKKEVEQRRAGGYSRKYASKAKNLADDMVRNTARDLLYYAVTQDAMLIFE |
| | NLSRGFGRQGKRTFMAERQYTRMEDWLTAKLAYEGLSKILLSKTLAQYTSKTCS |
| | NCGFTITSADYDRVLEKLKKTATGWMTTINGKELKVEGQITYYNRRKRQNVVKD |
| | LSVELDRLSEESVNNDISSWTKGRSGEALSLLKKRFSHRPVQEKFVCLNCGFET |
| | HADEQAALNIARSWLFLRSQEYKKYQTNKTTGNTDKRAFVETWQSFYRKKLKEV |
| | WKPAV (SEQ ID NO: 83) |
| 441 | MQEIKRINKIRRRLVKDSNIKKAGKTGPMKTLLVRVMTPDLRERLENLRKKPEN |
| L379R, | IPQPISNTSRANLNKLLTDYTEMKKAILHVYWEEFQKDPVGLMSRVAQPAPKNI |
| A708K, | DQRKLIPVKDGNERLTSSGFACSQCCQPLYVYKLEQVNDKGKPHTNYFGRCNVS |
| P793_, | EHERLILLSPHKPEANDELVTYSLGKFGQRALDFYSIHVTRESNHPVKPLEQIG |
| Y857R, | GNSCASGPVGKALSDACMGAVASFLTKYQDIILEHQKVIKKNEKRLANLKDIAS |
| I658V, | ANGLAFPKITLPPQPHTKEGIEAYNNVVAQIVIWVNLNLWQKLKIGRDEAKPLQ |
| F399L, | RLKGFPSFPLVERQANEVDWWDMVCNVKKLINEKKEDGKVFWQNLAGYKRQEAL |
| Y797L, | RPYLSSENDRKKGKKFARYQLGDLLLHLEKKHGEDWGKVYDEAWERIDKKVEGL |
| E386N | SKHIKLEEERRSEDAQSKAALTDWLRAKASFVIEGLKEADKDEFCRCELKLQKW |
| | YGDLRGKPFAIEAENSILDISGFSKQYNCAFIWQKDGVKKLNLYLIINYFKGGK |
| | LRFKKIKPEAFEANRFYTVINKKSGEIVPMEVNFNFDDPNLIILPLAFGKRQGR |
| | EFIWNDLLSLETGSLKLANGRVIEKTLYNRRTRQDEPALFVALTFERREVLDSS |
| | NIKPMNLIGVDRGENIPAVIALTDPEGCPLSRFKDSLGNPTHILRIGESYKEKQ |
| | RTIQAKKEVEQRRAGGYSRKYASKAKNLADDMVRNTARDLLYYAVTQDAMLIFE |
| | NLSRGFGRQGKRTFMAERQYTRMEDWLTAKLAYEGLSKILLSKTLAQYTSKTCS |
| | NCGFTITSADYDRVLEKLKKTATGWMTTINGKELKVEGQITYYNRRKRQNVVKD |
| | LSVELDRLSEESVNNDISSWTKGRSGEALSLLKKRFSHRPVQEKFVCLNCGFET |
| | HADEQAALNIARSWLFLRSQEYKKYQTNKTTGNTDKRAFVETWQSFYRKKLKEV |
| | WKPAV (SEQ ID NO: 84) |
| 442 | MQEIKRINKIRRRLVKDSNIKKAGKTGPMKTLLVRVMTPDLRERLENLRKKPEN |
| L379R, | IPQPISNTSRANLNKLLTDYTEMKKAILHVYWEEFQKDPVGLMSRVAQPAPKNI |
| A708K, | DQRKLIPVKDGNERLTSSGFACSQCCQPLYVYKLEQVNDKGKPHTNYFGRCNVS |
| P793_, | EHERLILLSPHKPEANDELVTYSLGKFGQRALDFYSIHVTRESNHPVKPLEQIG |
| Y857R, | GNSCASGPVGKALSDACMGAVASFLTKYQDIILEHQKVIKKNEKRLANLKDIAS |
| I658V, | ANGLAFPKITLPPQPHTKEGIEAYNNVVAQIVIWVNLNLWQKLKIGRDEAKPLQ |
| F399L, | RLKGFPSFPLVERQANEVDWWDMVCNVKKLINEKKEDGKVFWQNLAGYKRQEAL |
| Y797L, | RPYLSSENDRKKGKKFARYQLGDLLKHLEKKHGEDWGKVYDEAWERIDKKVEGL |
| E386N, | SKHIKLEEERRSEDAQSKAALTDWLRAKASFVIEGLKEADKDEFSRCELKLQKW |
| C477S, | YGDLRGKPFAIEAENSILDISGFSKQYNCAFIWQKDGVKKLNLYLIINYFKGGK |
| L404K | LRFKKIKPEAFEANRFYTVINKKSGEIVPMEVNFNFDDPNLIILPLAFGKRQGR |
| | EFIWNDLLSLETGSLKLANGRVIEKTLYNRRTRQDEPALFVALTFERREVLDSS |
| | NIKPMNLIGVDRGENIPAVIALTDPEGCPLSRFKDSLGNPTHILRIGESYKEKQ |
| | RTIQAKKEVEQRRAGGYSRKYASKAKNLADDMVRNTARDLLYYAVTQDAMLIFE |
| | NLSRGFGRQGKRTFMAERQYTRMEDWLTAKLAYEGLSKILLSKTLAQYTSKTCS |
| | NCGFTITSADYDRVLEKLKKTATGWMTTINGKELKVEGQITYYNRRKRQNVVKD |
| | LSVELDRLSEESVNNDISSWTKGRSGEALSLLKKRFSHRPVQEKFVCLNCGFET |
| | HADEQAALNIARSWLFLRSQEYKKYQTNKTTGNTDKRAFVETWQSFYRKKLKEV |
| | WKPAV (SEQ ID NO: 85) |
| 443 | MQEIKRINKIRRRLVKDSNIKKAGKTGPMKTLLVRVMTPDLRERLENLRKKPEN |
| L379R, | IPQPISNTSRANLNKLLTDYTEMKKAILHVYWEEFQKDPVGLMSRVAQPAPKNI |
| A708K, | DQRKLIPVKDGNERLTSSGFACSQCCQPLYVYKLEQVNDKGKPHTNYFGRCNVS |
| P793_, | EHERLILLSPHKPEANDELVTYSLGKFGQRALDFYSIHVTRESNHPVKPLEQIG |
| Y857R, | GNSCASGPVGKALSDACMGAVASFLTKYQDIILEHQKVIKKNEKRLANLKDIAS |
| I658V, | ANGLAFPKITLPPQPHTKEGIEAYNNVVAQIVIWVNLNLWQKLKIGRDEAKPLQ |
| Y797L | RLKGFPSFPLVERQANEVDWWDMVCNVKKLINEKKEDGKVFWQNLAGYKRQEAL |
| | RPYLSSEEDRKKGKKFARYQFGDLLLHLEKKHGEDWGKVYDEAWERIDKKVEGL |
| | SKHIKLEEERRSEDAQSKAALTDWLRAKASFVIEGLKEADKDEFCRCELKLQKW |
| | YGDLRGKPFAIEAENSILDISGFSKQYNCAFIWQKDGVKKLNLYLIINYFKGGK |
| | LRFKKIKPEAFEANRFYTVINKKSGEIVPMEVNFNFDDPNLIILPLAFGKRQGR |
| | EFIWNDLLSLETGSLKLANGRVIEKTLYNRRTRQDEPALFVALTFERREVLDSS |
| | NIKPMNLIGVDRGENIPAVIALTDPEGCPLSRFKDSLGNPTHILRIGESYKEKQ |
| | RTIQAKKEVEQRRAGGYSRKYASKAKNLADDMVRNTARDLLYYAVTQDAMLIFE |
| | NLSRGFGRQGKRTFMAERQYTRMEDWLTAKLAYEGLSKILLSKTLAQYTSKTCS |
| | NCGFTITSADYDRVLEKLKKTATGWMTTINGKELKVEGQITYYNRRKRQNVVKD |
| | LSVELDRLSEESVNNDISSWTKGRSGEALSLLKKRFSHRPVQEKFVCLNCGFET |
| | HADEQAALNIARSWLFLRSQEYKKYQTNKTTGNTDKRAFVETWQSFYRKKLKEV |
| | WKPAV (SEQ ID NO: 86) |
| 444 | MQEIKRINKIRRRLVKDSNIKKAGKTGPMKTLLVRVMTPDLRERLENLRKKPEN |
| L379R, | IPQPISNTSRANLNKLLTDYTEMKKAILHVYWEEFQKDPVGLMSRVAQPAPKNI |
| A708K, | DQRKLIPVKDGNERLTSSGFACSQCCQPLYVYKLEQVNDKGKPHTNYFGRCNVS |
| P793_, | EHERLILLSPHKPEANDELVTYSLGKFGQRALDFYSIHVTRESNHPVKPLEQIG |
| Y857R, | GNSCASGPVGKALSDACMGAVASFLTKYQDIILEHQKVIKKNEKRLANLKDIAS |
| I658V, | ANGLAFPKITLPPQPHTKEGIEAYNNVVAQIVIWVNLNLWQKLKIGRDEAKPLQ |
| Y797L, | RLKGFPSFPLVERQANEVDWWDMVCNVKKLINEKKEDGKVFWQNLAGYKRQEAL |
| L404K | RPYLSSEEDRKKGKKFARYQFGDLLKHLEKKHGEDWGKVYDEAWERIDKKVEGL |
| | SKHIKLEEERRSEDAQSKAALTDWLRAKASFVIEGLKEADKDEFCRCELKLQKW |
| | YGDLRGKPFAIEAENSILDISGFSKQYNCAFIWQKDGVKKLNLYLIINYFKGGK |
| | LRFKKIKPEAFEANRFYTVINKKSGEIVPMEVNFNFDDPNLIILPLAFGKRQGR |
| | EFIWNDLLSLETGSLKLANGRVIEKTLYNRRTRQDEPALFVALTFERREVLDSS |
| | NIKPMNLIGVDRGENIPAVIALTDPEGCPLSRFKDSLGNPTHILRIGESYKEKQ |
| | RTIQAKKEVEQRRAGGYSRKYASKAKNLADDMVRNTARDLLYYAVTQDAMLIFE |
| | NLSRGFGRQGKRTFMAERQYTRMEDWLTAKLAYEGLSKILLSKTLAQYTSKTCS |
| | NCGFTITSADYDRVLEKLKKTATGWMTTINGKELKVEGQITYYNRRKRQNVVKD |
| | LSVELDRLSEESVNNDISSWTKGRSGEALSLLKKRFSHRPVQEKFVCLNCGFET |
| | HADEQAALNIARSWLFLRSQEYKKYQTNKTTGNTDKRAFVETWQSFYRKKLKEV |
| | WKPAV (SEQ ID NO: 87) |
| 445 | MQEIKRINKIRRRLVKDSNIKKAGKTGPMKTLLVRVMTPDLRERLENLRKKPEN |
| L379R, | IPQPISNTSRANLNKLLTDYTEMKKAILHVYWEEFQKDPVGLMSRVAQPAPKNI |
| A708K, | DQRKLIPVKDGNERLTSSGFACSQCCQPLYVYKLEQVNDKGKPHTNYFGRCNVS |
| P793_, | EHERLILLSPHKPEANDELVTYSLGKFGQRALDFYSIHVTRESNHPVKPLEQIG |
| Y857R, | GNSCASGPVGKALSDACMGAVASFLTKYQDIILEHQKVIKKNEKRLANLKDIAS |
| I658V, | ANGLAFPKITLPPQPHTKEGIEAYNNVVAQIVIWVNLNLWQKLKIGRDEAKPLQ |
| Y797L, | RLKGFPSFPLVERQANEVDWWDMVCNVKKLINEKKEDGKVFWQNLAGYKRQEAL |
| E386N | RPYLSSENDRKKGKKFARYQFGDLLLHLEKKHGEDWGKVYDEAWERIDKKVEGL |
| | SKHIKLEEERRSEDAQSKAALTDWLRAKASFVIEGLKEADKDEFCRCELKLQKW |
| | YGDLRGKPFAIEAENSILDISGFSKQYNCAFIWQKDGVKKLNLYLIINYFKGGK |
| | LRFKKIKPEAFEANRFYTVINKKSGEIVPMEVNFNFDDPNLIILPLAFGKRQGR |
| | EFIWNDLLSLETGSLKLANGRVIEKTLYNRRTRQDEPALFVALTFERREVLDSS |
| | NIKPMNLIGVDRGENIPAVIALTDPEGCPLSRFKDSLGNPTHILRIGESYKEKQ |
| | RTIQAKKEVEQRRAGGYSRKYASKAKNLADDMVRNTARDLLYYAVTQDAMLIFE |
| | NLSRGFGRQGKRTFMAERQYTRMEDWLTAKLAYEGLSKILLSKTLAQYTSKTCS |
| | NCGFTITSADYDRVLEKLKKTATGWMTTINGKELKVEGQITYYNRRKRQNVVKD |
| | LSVELDRLSEESVNNDISSWTKGRSGEALSLLKKRFSHRPVQEKFVCLNCGFET |
| | HADEQAALNIARSWLFLRSQEYKKYQTNKTTGNTDKRAFVETWQSFYRKKLKEV |
| | WKPAV (SEQ ID NO: 88) |
| 446 | MQEIKRINKIRRRLVKDSNIKKAGKTGPMKTLLVRVMTPDLRERLENLRKKPEN |
| L379R, | IPQPISNTSRANLNKLLTDYTEMKKAILHVYWEEFQKDPVGLMSRVAQPAPKNI |
| A708K, | DQRKLIPVKDGNERLTSSGFACSQCCQPLYVYKLEQVNDKGKPHTNYFGRCNVS |
| P793_, | EHERLILLSPHKPEANDELVTYSLGKFGQRALDFYSIHVTRESNHPVKPLEQIG |
| Y857R, | GNSCASGPVGKALSDACMGAVASFLTKYQDIILEHQKVIKKNEKRLANLKDIAS |
| I658V, | ANGLAFPKITLPPQPHTKEGIEAYNNVVAQIVIWVNLNLWQKLKIGRDEAKPLQ |
| Y797L, | RLKGFPSFPLVERQANEVDWWDMVCNVKKLINEKKEDGKVFWQNLAGYKRQEAL |
| E386N, | RPYLSSENDRKKGKKFARYQFGDLLKHLEKKHGEDWGKVYDEAWERIDKKVEGL |
| C477S, | SKHIKLEEERRSEDAQSKAALTDWLRAKASFVIEGLKEADKDEFSRCELKLQKW |
| L404K | YGDLRGKPFAIEAENSILDISGFSKQYNCAFIWQKDGVKKLNLYLIINYFKGGK |
| | LRFKKIKPEAFEANRFYTVINKKSGEIVPMEVNFNFDDPNLIILPLAFGKRQGR |
| | EFIWNDLLSLETGSLKLANGRVIEKTLYNRRTRQDEPALFVALTFERREVLDSS |
| | NIKPMNLIGVDRGENIPAVIALTDPEGCPLSRFKDSLGNPTHILRIGESYKEKQ |
| | RTIQAKKEVEQRRAGGYSRKYASKAKNLADDMVRNTARDLLYYAVTQDAMLIFE |
| | NLSRGFGRQGKRTFMAERQYTRMEDWLTAKLAYEGLSKILLSKTLAQYTSKTCS |
| | NCGFTITSADYDRVLEKLKKTATGWMTTINGKELKVEGQITYYNRRKRQNVVKD |
| | LSVELDRLSEESVNNDISSWTKGRSGEALSLLKKRFSHRPVQEKFVCLNCGFET |
| | HADEQAALNIARSWLFLRSQEYKKYQTNKTTGNTDKRAFVETWQSFYRKKLKEV |
| | WKPAV (SEQ ID NO: 89) |
| 447 | MQEIKRINKIRRRLVKDSNIKKAGKTGPMKTLLVRVMTPDLRERLENLRKKPEN |
| L379R, | IPQPISNTSRANLNKLLTDYTEMKKAILHVYWEEFQKDPVGLMSRVAQPAPKNI |
| A708K, | DQRKLIPVKDGNERLTSSGFACSQCCQPLYVYKLEQVNDKGKPHTNYFGRCNVS |
| P793_, | EHERLILLSPHKPEANDELVTYSLGKFGQRALDFYSIHVTRESNHPVKPLEQIG |
| Y857R, | GNSCASGPVGKALSDACMGAVASFLTKYQDIILEHQKVIKKNEKRLANLKDIAS |
| E386N | ANGLAFPKITLPPQPHTKEGIEAYNNVVAQIVIWVNLNLWQKLKIGRDEAKPLQ |
| | RLKGFPSFPLVERQANEVDWWDMVCNVKKLINEKKEDGKVFWQNLAGYKRQEAL |
| | RPYLSSENDRKKGKKFARYQFGDLLLHLEKKHGEDWGKVYDEAWERIDKKVEGL |
| | SKHIKLEEERRSEDAQSKAALTDWLRAKASFVIEGLKEADKDEFCRCELKLQKW |
| | YGDLRGKPFAIEAENSILDISGFSKQYNCAFIWQKDGVKKLNLYLIINYFKGGK |
| | LRFKKIKPEAFEANRFYTVINKKSGEIVPMEVNFNFDDPNLIILPLAFGKRQGR |
| | EFIWNDLLSLETGSLKLANGRVIEKTLYNRRTRQDEPALFVALTFERREVLDSS |
| | NIKPMNLIGIDRGENIPAVIALTDPEGCPLSRFKDSLGNPTHILRIGESYKEKQ |
| | RTIQAKKEVEQRRAGGYSRKYASKAKNLADDMVRNTARDLLYYAVTQDAMLIFE |
| | NLSRGFGRQGKRTFMAERQYTRMEDWLTAKLAYEGLSKTYLSKTLAQYTSKTCS |
| | NCGFTITSADYDRVLEKLKKTATGWMTTINGKELKVEGQITYYNRRKRQNVVKD |
| | LSVELDRLSEESVNNDISSWTKGRSGEALSLLKKRFSHRPVQEKFVCLNCGFET |
| | HADEQAALNIARSWLFLRSQEYKKYQTNKTTGNTDKRAFVETWQSFYRKKLKEV |
| | WKPAV (SEQ ID NO: 90) |
| 448: | MQEIKRINKIRRRLVKDSNIKKAGKTGPMKTLLVRVMTPDLRERLENLRKKPEN |
| L379R, | IPQPISNTSRANLNKLLTDYTEMKKAILHVYWEEFQKDPVGLMSRVAQPAPKNI |
| A708K, | DQRKLIPVKDGNERLTSSGFACSQCCQPLYVYKLEQVNDKGKPHTNYFGRCNVS |
| P793_, | EHERLILLSPHKPEANDELVTYSLGKFGQRALDFYSIHVTRESNHPVKPLEQIG |
| Y857R, | GNSCASGPVGKALSDACMGAVASFLTKYQDIILEHQKVIKKNEKRLANLKDIAS |
| E386N, | ANGLAFPKITLPPQPHTKEGIEAYNNVVAQIVIWVNLNLWQKLKIGRDEAKPLQ |
| L404K | RLKGFPSFPLVERQANEVDWWDMVCNVKKLINEKKEDGKVFWQNLAGYKRQEAL |
| | RPYLSSENDRKKGKKFARYQFGDLLKHLEKKHGEDWGKVYDEAWERIDKKVEGL |
| | SKHIKLEEERRSEDAQSKAALTDWLRAKASFVIEGLKEADKDEFCRCELKLQKW |
| | YGDLRGKPFAIEAENSILDISGFSKQYNCAFIWQKDGVKKLNLYLIINYFKGGK |
| | LRFKKIKPEAFEANRFYTVINKKSGEIVPMEVNFNFDDPNLIILPLAFGKRQGR |
| | EFIWNDLLSLETGSLKLANGRVIEKTLYNRRTRQDEPALFVALTFERREVLDSS |
| | NIKPMNLIGIDRGENIPAVIALTDPEGCPLSRFKDSLGNPTHILRIGESYKEKQ |
| | RTIQAKKEVEQRRAGGYSRKYASKAKNLADDMVRNTARDLLYYAVTQDAMLIFE |
| | NLSRGFGRQGKRTFMAERQYTRMEDWLTAKLAYEGLSKTYLSKTLAQYTSKTCS |
| | NCGFTITSADYDRVLEKLKKTATGWMTTINGKELKVEGQITYYNRRKRQNVVKD |
| | LSVELDRLSEESVNNDISSWTKGRSGEALSLLKKRFSHRPVQEKFVCLNCGFET |
| | HADEQAALNIARSWLFLRSQEYKKYQTNKTTGNTDKRAFVETWQSFYRKKLKEV |
| | WKPAV (SEQ ID NO: 91) |
| 449: | MQEIKRINKIRRRLVKDSNIKKAGKTGPMKTLLVRVMTPDLRERLENLRKKPEN |
| L379R, | IPQPISNTSRANLNKLLTDYTEMKKAILHVYWEEFQKDPVGLMSRVAQPAPKNI |
| A708K, | DQRKLIPVKDGNERLTSSGFACSQCCQPLYVYKLEQVNDKGKPHTNYFGRCNVS |
| P793_, | EHERLILLSPHKPEANDELVTYSLGKFGQRALDFYSIHVTRESNHPVKPLEQIG |
| D732N, | GNSCASGPVGKALSDACMGAVASFLTKYQDIILEHQKVIKKNEKRLANLKDIAS |
| E385P, | ANGLAFPKITLPPQPHTKEGIEAYNNVVAQIVIWVNLNLWQKLKIGRDEAKPLQ |
| Y857R | RLKGFPSFPLVERQANEVDWWDMVCNVKKLINEKKEDGKVFWQNLAGYKRQEAL |
| | RPYLSSPEDRKKGKKFARYQFGDLLLHLEKKHGEDWGKVYDEAWERIDKKVEGL |
| | SKHIKLEEERRSEDAQSKAALTDWLRAKASFVIEGLKEADKDEFCRCELKLQKW |
| | YGDLRGKPFAIEAENSILDISGFSKQYNCAFIWQKDGVKKLNLYLIINYFKGGK |
| | LRFKKIKPEAFEANRFYTVINKKSGEIVPMEVNFNFDDPNLIILPLAFGKRQGR |
| | EFIWNDLLSLETGSLKLANGRVIEKTLYNRRTRQDEPALFVALTFERREVLDSS |
| | NIKPMNLIGIDRGENIPAVIALTDPEGCPLSRFKDSLGNPTHILRIGESYKEKQ |
| | RTIQAKKEVEQRRAGGYSRKYASKAKNLANDMVRNTARDLLYYAVTQDAMLIFE |
| | NLSRGFGRQGKRTFMAERQYTRMEDWLTAKLAYEGLSKTYLSKTLAQYTSKTCS |
| | NCGFTITSADYDRVLEKLKKTATGWMTTINGKELKVEGQITYYNRRKRQNVVKD |
| | LSVELDRLSEESVNNDISSWTKGRSGEALSLLKKRFSHRPVQEKFVCLNCGFET |
| | HADEQAALNIARSWLFLRSQEYKKYQTNKTTGNTDKRAFVETWQSFYRKKLKEV |
| | WKPAV (SEQ ID NO: 92) |
| 450 | MQEIKRINKIRRRLVKDSNIKKAGKTGPMKTLLVRVMTPDLRERLENLRKKPEN |
| L379R, | IPQPISNTSRANLNKLLTDYTEMKKAILHVYWEEFQKDPVGLMSRVAQPAPKNI |
| A708K, | DQRKLIPVKDGNERLTSSGFACSQCCQPLYVYKLEQVNDKGKPHTNYFGRCNVS |
| P793_, | EHERLILLSPHKPEANDELVTYSLGKFGQRALDFYSIHVTRESNHPVKPLEQIG |
| D732N, | GNSCASGPVGKALSDACMGAVASFLTKYQDIILEHQKVIKKNEKRLANLKDIAS |
| E385P, | ANGLAFPKITLPPQPHTKEGIEAYNNVVAQIVIWVNLNLWQKLKIGRDEAKPLQ |
| Y857R, | RLKGFPSFPLVERQANEVDWWDMVCNVKKLINEKKEDGKVFWQNLAGYKRQEAL |
| I658V | RPYLSSPEDRKKGKKFARYQFGDLLLHLEKKHGEDWGKVYDEAWERIDKKVEGL |
| | SKHIKLEEERRSEDAQSKAALTDWLRAKASFVIEGLKEADKDEFCRCELKLQKW |
| | YGDLRGKPFAIEAENSILDISGFSKQYNCAFIWQKDGVKKLNLYLIINYFKGGK |
| | LRFKKIKPEAFEANRFYTVINKKSGEIVPMEVNFNFDDPNLIILPLAFGKRQGR |
| | EFIWNDLLSLETGSLKLANGRVIEKTLYNRRTRQDEPALFVALTFERREVLDSS |
| | NIKPMNLIGVDRGENIPAVIALTDPEGCPLSRFKDSLGNPTHILRIGESYKEKQ |
| | RTIQAKKEVEQRRAGGYSRKYASKAKNLANDMVRNTARDLLYYAVTQDAMLIFE |
| | NLSRGFGRQGKRTFMAERQYTRMEDWLTAKLAYEGLSKTYLSKTLAQYTSKTCS |
| | NCGFTITSADYDRVLEKLKKTATGWMTTINGKELKVEGQITYYNRRKRQNVVKD |
| | LSVELDRLSEESVNNDISSWTKGRSGEALSLLKKRFSHRPVQEKFVCLNCGFET |
| | HADEQAALNIARSWLFLRSQEYKKYQTNKTTGNTDKRAFVETWQSFYRKKLKEV |
| | WKPAV (SEQ ID NO: 93) |
| 451: | MQEIKRINKIRRRLVKDSNIKKAGKTGPMKTLLVRVMTPDLRERLENLRKKPEN |
| L379R, | IPQPISNTSRANLNKLLTDYTEMKKAILHVYWEEFQKDPVGLMSRVAQPAPKNI |
| A708K, | DQRKLIPVKDGNERLTSSGFACSQCCQPLYVYKLEQVNDKGKPHTNYFGRCNVS |
| P793_, | EHERLILLSPHKPEANDELVTYSLGKFGQRALDFYSIHVTRESNHPVKPLEQIG |
| D732N, | GNSCASGPVGKALSDACMGAVASFLTKYQDIILEHQKVIKKNEKRLANLKDIAS |
| E385P, | ANGLAFPKITLPPQPHTKEGIEAYNNVVAQIVIWVNLNLWQKLKIGRDEAKPLQ |
| Y857R, | RLKGFPSFPLVERQANEVDWWDMVCNVKKLINEKKEDGKVFWQNLAGYKRQEAL |
| I658V, | RPYLSSPEDRKKGKKFARYQLGDLLLHLEKKHGEDWGKVYDEAWERIDKKVEGL |
| F399L | SKHIKLEEERRSEDAQSKAALTDWLRAKASFVIEGLKEADKDEFCRCELKLQKW |
| | YGDLRGKPFAIEAENSILDISGFSKQYNCAFIWQKDGVKKLNLYLIINYFKGGK |
| | LRFKKIKPEAFEANRFYTVINKKSGEIVPMEVNFNFDDPNLIILPLAFGKRQGR |
| | EFIWNDLLSLETGSLKLANGRVIEKTLYNRRTRQDEPALFVALTFERREVLDSS |
| | NIKPMNLIGVDRGENIPAVIALTDPEGCPLSRFKDSLGNPTHILRIGESYKEKQ |
| | RTIQAKKEVEQRRAGGYSRKYASKAKNLANDMVRNTARDLLYYAVTQDAMLIFE |
| | NLSRGFGRQGKRTFMAERQYTRMEDWLTAKLAYEGLSKTYLSKTLAQYTSKTCS |
| | NCGFTITSADYDRVLEKLKKTATGWMTTINGKELKVEGQITYYNRRKRQNVVKD |
| | LSVELDRLSEESVNNDISSWTKGRSGEALSLLKKRFSHRPVQEKFVCLNCGFET |
| | HADEQAALNIARSWLFLRSQEYKKYQTNKTTGNTDKRAFVETWQSFYRKKLKEV |
| | WKPAV (SEQ ID NO: 94) |
| 452 | MQEIKRINKIRRRLVKDSNIKKAGKTGPMKTLLVRVMTPDLRERLENLRKKPEN |
| L379R, | IPQPISNTSRANLNKLLTDYTEMKKAILHVYWEEFQKDPVGLMSRVAQPAPKNI |
| A708K, | DQRKLIPVKDGNERLTSSGFACSQCCQPLYVYKLEQVNDKGKPHTNYFGRCNVS |
| P793_, | EHERLILLSPHKPEANDELVTYSLGKFGQRALDFYSIHVTRESNHPVKPLEQIG |
| D732N, | GNSCASGPVGKALSDACMGAVASFLTKYQDIILEHQKVIKKNEKRLANLKDIAS |
| E385P, | ANGLAFPKITLPPQPHTKEGIEAYNNVVAQIVIWVNLNLWQKLKIGRDEAKPLQ |
| Y857R, | RLKGFPSFPLVERQANEVDWWDMVCNVKKLINEKKEDGKVFWQNLAGYKRQEAL |
| I658V, | RPYLSSPNDRKKGKKFARYQFGDLLLHLEKKHGEDWGKVYDEAWERIDKKVEGL |
| E386N | SKHIKLEEERRSEDAQSKAALTDWLRAKASFVIEGLKEADKDEFCRCELKLQKW |
| | YGDLRGKPFAIEAENSILDISGFSKQYNCAFIWQKDGVKKLNLYLIINYFKGGK |
| | LRFKKIKPEAFEANRFYTVINKKSGEIVPMEVNFNFDDPNLIILPLAFGKRQGR |
| | EFIWNDLLSLETGSLKLANGRVIEKTLYNRRTRQDEPALFVALTFERREVLDSS |
| | NIKPMNLIGVDRGENIPAVIALTDPEGCPLSRFKDSLGNPTHILRIGESYKEKQ |
| | RTIQAKKEVEQRRAGGYSRKYASKAKNLANDMVRNTARDLLYYAVTQDAMLIFE |
| | NLSRGFGRQGKRTFMAERQYTRMEDWLTAKLAYEGLSKTYLSKTLAQYTSKTCS |
| | NCGFTITSADYDRVLEKLKKTATGWMTTINGKELKVEGQITYYNRRKRQNVVKD |
| | LSVELDRLSEESVNNDISSWTKGRSGEALSLLKKRFSHRPVQEKFVCLNCGFET |
| | HADEQAALNIARSWLFLRSQEYKKYQTNKTTGNTDKRAFVETWQSFYRKKLKEV |
| | WKPAV (SEQ ID NO: 95) |
| 453 | MQEIKRINKIRRRLVKDSNIKKAGKTGPMKTLLVRVMTPDLRERLENLRKKPEN |
| L379R, | IPQPISNTSRANLNKLLTDYTEMKKAILHVYWEEFQKDPVGLMSRVAQPAPKNI |
| A708K, | DQRKLIPVKDGNERLTSSGFACSQCCQPLYVYKLEQVNDKGKPHTNYFGRCNVS |
| P793_, | EHERLILLSPHKPEANDELVTYSLGKFGQRALDFYSIHVTRESNHPVKPLEQIG |
| D732N, | GNSCASGPVGKALSDACMGAVASFLTKYQDIILEHQKVIKKNEKRLANLKDIAS |
| E385P, | ANGLAFPKITLPPQPHTKEGIEAYNNVVAQIVIWVNLNLWQKLKIGRDEAKPLQ |
| Y857R, | RLKGFPSFPLVERQANEVDWWDMVCNVKKLINEKKEDGKVFWQNLAGYKRQEAL |
| I658V, | RPYLSSPEDRKKGKKFARYQFGDLLKHLEKKHGEDWGKVYDEAWERIDKKVEGL |
| L404K | SKHIKLEEERRSEDAQSKAALTDWLRAKASFVIEGLKEADKDEFCRCELKLQKW |
| | YGDLRGKPFAIEAENSILDISGFSKQYNCAFIWQKDGVKKLNLYLIINYFKGGK |
| | LRFKKIKPEAFEANRFYTVINKKSGEIVPMEVNFNFDDPNLIILPLAFGKRQGR |
| | EFIWNDLLSLETGSLKLANGRVIEKTLYNRRTRQDEPALFVALTFERREVLDSS |
| | NIKPMNLIGVDRGENIPAVIALTDPEGCPLSRFKDSLGNPTHILRIGESYKEKQ |
| | RTIQAKKEVEQRRAGGYSRKYASKAKNLANDMVRNTARDLLYYAVTQDAMLIFE |
| | NLSRGFGRQGKRTFMAERQYTRMEDWLTAKLAYEGLSKTYLSKTLAQYTSKTCS |
| | NCGFTITSADYDRVLEKLKKTATGWMTTINGKELKVEGQITYYNRRKRQNVVKD |
| | LSVELDRLSEESVNNDISSWTKGRSGEALSLLKKRFSHRPVQEKFVCLNCGFET |
| | HADEQAALNIARSWLFLRSQEYKKYQTNKTTGNTDKRAFVETWQSFYRKKLKEV |
| | WKPAV (SEQ ID NO: 96) |
| 454 | MQEIKRINKIRRRLVKDSNIKKAGKTGPMKTLLVRVMTPDLRERLENLRKKPEN |
| L379R, | IPQPISNTSRANLNKLLTDYTEMKKAILHVYWEEFQKDPVGLMSRVAQPAPKNI |
| A708K, | DQRKLIPVKDGNERLTSSGFACSQCCQPLYVYKLEQVNDKGKPHTNYFGRCNVS |
| P793_, | EHERLILLSPHKPEANDELVTYSLGKFGQRALDFYSIHVTRESNHPVKPLEQIG |
| T620P, | GNSCASGPVGKALSDACMGAVASFLTKYQDIILEHKKVIKKNEKRLANLKDIAS |
| E385P, | ANGLAFPKITLPPQPHTKEGIEAYNNVVAQIVIWVNLNLWQKLKIGRDEAKPLQ |
| Y857R, | RLKGFPSFPLVERQANEVDWWDMVCNVKKLINEKKEDGKVFWQNLAGYKRQEAL |
| Q252K | RPYLSSPEDRKKGKKFARYQFGDLLLHLEKKHGEDWGKVYDEAWERIDKKVEGL |
| | SKHIKLEEERRSEDAQSKAALTDWLRAKASFVIEGLKEADKDEFCRCELKLQKW |
| | YGDLRGKPFAIEAENSILDISGFSKQYNCAFIWQKDGVKKLNLYLIINYFKGGK |
| | LRFKKIKPEAFEANRFYTVINKKSGEIVPMEVNFNFDDPNLIILPLAFGKRQGR |
| | EFIWNDLLSLETGSLKLANGRVIEKPLYNRRTRQDEPALFVALTFERREVLDSS |
| | NIKPMNLIGIDRGENIPAVIALTDPEGCPLSRFKDSLGNPTHILRIGESYKEKQ |
| | RTIQAKKEVEQRRAGGYSRKYASKAKNLADDMVRNTARDLLYYAVTQDAMLIFE |
| | NLSRGFGRQGKRTFMAERQYTRMEDWLTAKLAYEGLSKTYLSKTLAQYTSKTCS |
| | NCGFTITSADYDRVLEKLKKTATGWMTTINGKELKVEGQITYYNRRKRQNVVKD |
| | LSVELDRLSEESVNNDISSWTKGRSGEALSLLKKRFSHRPVQEKFVCLNCGFET |
| | HADEQAALNIARSWLFLRSQEYKKYQTNKTTGNTDKRAFVETWQSFYRKKLKEV |
| | WKPAV (SEQ ID NO: 97) |
| 455 | MQEIKRINKIRRRLVKDSNIKKAGKTGPMKTLLVRVMTPDLRERLENLRKKPEN |
| L379R, | IPQPISNTSRANLNKLLTDYTEMKKAILHVYWEEFQKDPVGLMSRVAQPAPKNI |
| A708K, | DQRKLIPVKDGNERLTSSGFACSQCCQPLYVYKLEQVNDKGKPHTNYFGRCNVS |
| P793_, | EHERLILLSPHKPEANDELVTYSLGKFGQRALDFYSIHVTRESNHPVKPLEQIG |
| T620P, | GNSCASGPVGKALSDACMGAVASFLTKYQDIILEHKKVIKKNEKRLANLKDIAS |
| E385P, | ANGLAFPKITLPPQPHTKEGIEAYNNVVAQIVIWVNLNLWQKLKIGRDEAKPLQ |
| Y857R, | RLKGFPSFPLVERQANEVDWWDMVCNVKKLINEKKEDGKVFWQNLAGYKRQEAL |
| I658V, | RPYLSSPEDRKKGKKFARYQFGDLLLHLEKKHGEDWGKVYDEAWERIDKKVEGL |
| Q252K | SKHIKLEEERRSEDAQSKAALTDWLRAKASFVIEGLKEADKDEFCRCELKLQKW |
| | YGDLRGKPFAIEAENSILDISGFSKQYNCAFIWQKDGVKKLNLYLIINYFKGGK |
| | LRFKKIKPEAFEANRFYTVINKKSGEIVPMEVNFNFDDPNLIILPLAFGKRQGR |
| | EFIWNDLLSLETGSLKLANGRVIEKPLYNRRTRQDEPALFVALTFERREVLDSS |
| | NIKPMNLIGVDRGENIPAVIALTDPEGCPLSRFKDSLGNPTHILRIGESYKEKQ |
| | RTIQAKKEVEQRRAGGYSRKYASKAKNLADDMVRNTARDLLYYAVTQDAMLIFE |
| | NLSRGFGRQGKRTFMAERQYTRMEDWLTAKLAYEGLSKTYLSKTLAQYTSKTCS |
| | NCGFTITSADYDRVLEKLKKTATGWMTTINGKELKVEGQITYYNRRKRQNVVKD |
| | LSVELDRLSEESVNNDISSWTKGRSGEALSLLKKRFSHRPVQEKFVCLNCGFET |
| | HADEQAALNIARSWLFLRSQEYKKYQTNKTTGNTDKRAFVETWQSFYRKKLKEV |
| | WKPAV (SEQ ID NO: 98) |
| 456 | MQEIKRINKIRRRLVKDSNIKKAGKTGPMKTLLVRVMTPDLRERLENLRKKPEN |
| L379R, | IPQPISNTSRANLNKLLTDYTEMKKAILHVYWEEFQKDPVGLMSRVAQPAPKNI |
| A708K, | DQRKLIPVKDGNERLTSSGFACSQCCQPLYVYKLEQVNDKGKPHTNYFGRCNVS |
| P793_, | EHERLILLSPHKPEANDELVTYSLGKFGQRALDFYSIHVTRESNHPVKPLEQIG |
| T620P, | GNSCASGPVGKALSDACMGAVASFLTKYQDIILEHKKVIKKNEKRLANLKDIAS |
| E385P, | ANGLAFPKITLPPQPHTKEGIEAYNNVVAQIVIWVNLNLWQKLKIGRDEAKPLQ |
| Y857R, | RLKGFPSFPLVERQANEVDWWDMVCNVKKLINEKKEDGKVFWQNLAGYKRQEAL |
| I658V, | RPYLSSPNDRKKGKKFARYQFGDLLLHLEKKHGEDWGKVYDEAWERIDKKVEGL |
| E386N, | SKHIKLEEERRSEDAQSKAALTDWLRAKASFVIEGLKEADKDEFCRCELKLQKW |
| Q252K | YGDLRGKPFAIEAENSILDISGFSKQYNCAFIWQKDGVKKLNLYLIINYFKGGK |
| | LRFKKIKPEAFEANRFYTVINKKSGEIVPMEVNFNFDDPNLIILPLAFGKRQGR |
| | EFIWNDLLSLETGSLKLANGRVIEKPLYNRRTRQDEPALFVALTFERREVLDSS |
| | NIKPMNLIGVDRGENIPAVIALTDPEGCPLSRFKDSLGNPTHILRIGESYKEKQ |
| | RTIQAKKEVEQRRAGGYSRKYASKAKNLADDMVRNTARDLLYYAVTQDAMLIFE |
| | NLSRGFGRQGKRTFMAERQYTRMEDWLTAKLAYEGLSKTYLSKTLAQYTSKTCS |
| | NCGFTITSADYDRVLEKLKKTATGWMTTINGKELKVEGQITYYNRRKRQNVVKD |
| | LSVELDRLSEESVNNDISSWTKGRSGEALSLLKKRFSHRPVQEKFVCLNCGFET |
| | HADEQAALNIARSWLFLRSQEYKKYQTNKTTGNTDKRAFVETWQSFYRKKLKEV |
| | WKPAV (SEQ ID NO: 99) |
| 457 | MQEIKRINKIRRRLVKDSNIKKAGKTGPMKTLLVRVMTPDLRERLENLRKKPEN |
| L379R, | IPQPISNTSRANLNKLLTDYTEMKKAILHVYWEEFQKDPVGLMSRVAQPAPKNI |
| A708K, | DQRKLIPVKDGNERLTSSGFACSQCCQPLYVYKLEQVNDKGKPHTNYFGRCNVS |
| P793_, | EHERLILLSPHKPEANDELVTYSLGKFGQRALDFYSIHVTRESNHPVKPLEQIG |
| T620P, | GNSCASGPVGKALSDACMGAVASFLTKYQDIILEHKKVIKKNEKRLANLKDIAS |
| E385P, | ANGLAFPKITLPPQPHTKEGIEAYNNVVAQIVIWVNLNLWQKLKIGRDEAKPLQ |
| Y857R, | RLKGFPSFPLVERQANEVDWWDMVCNVKKLINEKKEDGKVFWQNLAGYKRQEAL |
| I658V, | RPYLSSPEDRKKGKKFARYQLGDLLLHLEKKHGEDWGKVYDEAWERIDKKVEGL |
| F399L, | SKHIKLEEERRSEDAQSKAALTDWLRAKASFVIEGLKEADKDEFCRCELKLQKW |
| Q252K | YGDLRGKPFAIEAENSILDISGFSKQYNCAFIWQKDGVKKLNLYLIINYFKGGK |
| | LRFKKIKPEAFEANRFYTVINKKSGEIVPMEVNFNFDDPNLIILPLAFGKRQGR |
| | EFIWNDLLSLETGSLKLANGRVIEKPLYNRRTRQDEPALFVALTFERREVLDSS |
| | NIKPMNLIGVDRGENIPAVIALTDPEGCPLSRFKDSLGNPTHILRIGESYKEKQ |
| | RTIQAKKEVEQRRAGGYSRKYASKAKNLADDMVRNTARDLLYYAVTQDAMLIFE |
| | NLSRGFGRQGKRTFMAERQYTRMEDWLTAKLAYEGLSKTYLSKTLAQYTSKTCS |
| | NCGFTITSADYDRVLEKLKKTATGWMTTINGKELKVEGQITYYNRRKRQNVVKD |
| | LSVELDRLSEESVNNDISSWTKGRSGEALSLLKKRFSHRPVQEKFVCLNCGFET |
| | HADEQAALNIARSWLFLRSQEYKKYQTNKTTGNTDKRAFVETWQSFYRKKLKEV |
| | WKPAV (SEQ ID NO: 101) |
| 458: | MQEIKRINKIRRRLVKDSNIKKAGKTGPMKTLLVRVMTPDLRERLENLRKKPEN |
| L379R, | IPQPISNTSRANLNKLLTDYTEMKKAILHVYWEEFQKDPVGLMSRVAQPAPKNI |
| A708K, | DQRKLIPVKDGNERLTSSGFACSQCCQPLYVYKLEQVNDKGKPHTNYFGRCNVS |
| P793_, | EHERLILLSPHKPEANDELVTYSLGKFGQRALDFYSIHVTRESNHPVKPLEQIG |
| T620P, | GNSCASGPVGKALSDACMGAVASFLTKYQDIILEHKKVIKKNEKRLANLKDIAS |
| E385P, | ANGLAFPKITLPPQPHTKEGIEAYNNVVAQIVIWVNLNLWQKLKIGRDEAKPLQ |
| Y857R, | RLKGFPSFPLVERQANEVDWWDMVCNVKKLINEKKEDGKVFWQNLAGYKRQEAL |
| I658V, | RPYLSSPEDRKKGKKFARYQFGDLLKHLEKKHGEDWGKVYDEAWERIDKKVEGL |
| L404K, | SKHIKLEEERRSEDAQSKAALTDWLRAKASFVIEGLKEADKDEFCRCELKLQKW |
| Q252K | YGDLRGKPFAIEAENSILDISGFSKQYNCAFIWQKDGVKKLNLYLIINYFKGGK |
| | LRFKKIKPEAFEANRFYTVINKKSGEIVPMEVNFNFDDPNLIILPLAFGKRQGR |
| | EFIWNDLLSLETGSLKLANGRVIEKPLYNRRTRQDEPALFVALTFERREVLDSS |
| | NIKPMNLIGVDRGENIPAVIALTDPEGCPLSRFKDSLGNPTHILRIGESYKEKQ |
| | RTIQAKKEVEQRRAGGYSRKYASKAKNLADDMVRNTARDLLYYAVTQDAMLIFE |
| | NLSRGFGRQGKRTFMAERQYTRMEDWLTAKLAYEGLSKTYLSKTLAQYTSKTCS |
| | NCGFTITSADYDRVLEKLKKTATGWMTTINGKELKVEGQITYYNRRKRQNVVKD |
| | LSVELDRLSEESVNNDISSWTKGRSGEALSLLKKRFSHRPVQEKFVCLNCGFET |
| | HADEQAALNIARSWLFLRSQEYKKYQTNKTTGNTDKRAFVETWQSFYRKKLKEV |
| | WKPAV (SEQ ID NO: 102) |
| 459: | MQEIKRINKIRRRLVKDSNIKKAGKTGPMKTLLVRVMTPDLRERLENLRKKPEN |
| L379R, | IPQPISNTSRANLNKLLTDYTEMKKAILHVYWEEFQKDPVGLMSRVAQPAPKNI |
| A708K, | DQRKLIPVKDGNERLTSSGFACSQCCQPLYVYKLEQVNDKGKPHTNYFGRCNVS |
| P793_, | EHERLILLSPHKPEANDELVTYSLGKFGQRALDFYSIHVTRESNHPVKPLEQIG |
| T620P, | GNSCASGPVGKALSDACMGAVASFLTKYQDIILEHQKVIKKNEKRLANLKDIAS |
| Y857R, | ANGLAFPKITLPPQPHTKEGIEAYNNVVAQIVIWVNLNLWQKLKIGRDEAKPLQ |
| I658V, | RLKGFPSFPLVERQANEVDWWDMVCNVKKLINEKKEDGKVFWQNLAGYKRQEAL |
| E386N | RPYLSSENDRKKGKKFARYQFGDLLLHLEKKHGEDWGKVYDEAWERIDKKVEGL |
| | SKHIKLEEERRSEDAQSKAALTDWLRAKASFVIEGLKEADKDEFCRCELKLQKW |
| | YGDLRGKPFAIEAENSILDISGFSKQYNCAFIWQKDGVKKLNLYLIINYFKGGK |
| | LRFKKIKPEAFEANRFYTVINKKSGEIVPMEVNFNFDDPNLIILPLAFGKRQGR |
| | EFIWNDLLSLETGSLKLANGRVIEKPLYNRRTRQDEPALFVALTFERREVLDSS |
| | NIKPMNLIGVDRGENIPAVIALTDPEGCPLSRFKDSLGNPTHILRIGESYKEKQ |
| | RTIQAKKEVEQRRAGGYSRKYASKAKNLADDMVRNTARDLLYYAVTQDAMLIFE |
| | NLSRGFGRQGKRTFMAERQYTRMEDWLTAKLAYEGLSKTYLSKTLAQYTSKTCS |
| | NCGFTITSADYDRVLEKLKKTATGWMTTINGKELKVEGQITYYNRRKRQNVVKD |
| | LSVELDRLSEESVNNDISSWTKGRSGEALSLLKKRFSHRPVQEKFVCLNCGFET |
| | HADEQAALNIARSWLFLRSQEYKKYQTNKTTGNTDKRAFVETWQSFYRKKLKEV |
| | WKPAV (SEQ ID NO: 103) |
| 460: | MQEIKRINKIRRRLVKDSNIKKAGKTGPMKTLLVRVMTPDLRERLENLRKKPEN |
| L379R, | IPQPISNTSRANLNKLLTDYTEMKKAILHVYWEEFQKDPVGLMSRVAQPAPKNI |
| A708K, | DQRKLIPVKDGNERLTSSGFACSQCCQPLYVYKLEQVNDKGKPHTNYFGRCNVS |
| P793_, | EHERLILLSPHKPEANDELVTYSLGKFGQRALDFYSIHVTRESNHPVKPLEQIG |
| T620P, | GNSCASGPVGKALSDACMGAVASFLTKYQDIILEHKKVIKKNEKRLANLKDIAS |
| E385P, | ANGLAFPKITLPPQPHTKEGIEAYNNVVAQIVIWVNLNLWQKLKIGRDEAKPLQ |
| Q252K | RLKGFPSFPLVERQANEVDWWDMVCNVKKLINEKKEDGKVFWQNLAGYKRQEAL |
| | RPYLSSPEDRKKGKKFARYQFGDLLLHLEKKHGEDWGKVYDEAWERIDKKVEGL |
| | SKHIKLEEERRSEDAQSKAALTDWLRAKASFVIEGLKEADKDEFCRCELKLQKW |
| | YGDLRGKPFAIEAENSILDISGFSKQYNCAFIWQKDGVKKLNLYLIINYFKGGK |
| | LRFKKIKPEAFEANRFYTVINKKSGEIVPMEVNFNFDDPNLIILPLAFGKRQGR |
| | EFIWNDLLSLETGSLKLANGRVIEKPLYNRRTRQDEPALFVALTFERREVLDSS |
| | NIKPMNLIGIDRGENIPAVIALTDPEGCPLSRFKDSLGNPTHILRIGESYKEKQ |
| | RTIQAKKEVEQRRAGGYSRKYASKAKNLADDMVRNTARDLLYYAVTQDAMLIFE |
| | NLSRGFGRQGKRTFMAERQYTRMEDWLTAKLAYEGLSKTYLSKTLAQYTSKTCS |
| | NCGFTITSADYDRVLEKLKKTATGWMTTINGKELKVEGQITYYNRYKRQNVVKD |
| | LSVELDRLSEESVNNDISSWTKGRSGEALSLLKKRFSHRPVQEKFVCLNCGFET |
| | HADEQAALNIARSWLFLRSQEYKKYQTNKTTGNTDKRAFVETWQSFYRKKLKEV |
| | WKPAV (SEQ ID NO: 104) |
| 278 | QEIKRINKIRRRLVKDSNIKKAGKTGPMKTLLVRVMTPDLRERLENLRKKPENI |
| | PQPISNTSRANLNKLLTDYTEMKKAILHVYWEEFQKDPVGLMSRVAQPAPKNID |
| | QRKLIPVKDGNERLTSSGFACSQCCQPLYVYKLEQVNDKGKPHTNYFGRCNVSE |
| | HERLILLSPHKPEANDELVTYSLGKFGQRALDFYSIHVTRESNHPVKPLEQIGG |
| | NSCASGPVGKALSDACMGAVASFLTKYQDIILEHQKVIKKNEKRLANLKDIASA |
| | NGLAFPKITLPPQPHTKEGIEAYNNVVAQIVIWVNLNLWQKLKIGRDEAKPLQR |
| | LKGFPSFPLVERQANEVDWWDMVCNVKKLINEKKEDGKVFWQNLAGYKRQEALR |
| | PYLSSEEDRKKGKKFARYQFGDLLLHLEKKHGEDWGKVYDEAWERIDKKVEGLS |
| | KHIKLEEERRSEDAQSKAALTDWLRAKASFVIEGLKEADKDEFCRCELKLQKWY |
| | GDLRGKPFAIEAENSILDISGFSKQYNCAFIWQKDGVKKLNLYLIINYFKGGKL |
| | RFKKIKPEAFEANRFYTVINKKSGEIVPMEVNFNFDDPNLIILPLAFGKRQGRE |
| | FIWNDLLSLETGSLKLANGRVIEKTLYNRRTRQDEPALFVALTFERREVLDSSN |
| | IKPMNLIGIDRGENIPAVIALTDPEGCPLSRFKDSLGNPTHILRIGESYKEKQR |
| | TIQAKKEVEQRRAGGYSRKYASKAKNLADDMVRNTARDLLYYAVTQDAMLIFEN |
| | LSRGFGRQGKRTFMAERQYTRMEDWLTAKLAYEGLSKTYLSKTLAQYTSKTCSN |
| | CGFTITSADYDRVLEKLKKTATGWMTTINGKELKVEGQITYYNRYKRQNVVKDL |
| | SVELDRLSEESVNNDISSWTKGRSGEALSLLKKRFSHRPVQEKFVCLNCGFETH |
| | ADEQAALNIARSWLFLRSQEYKKYQTNKTTGNTDKRAFVETWQSFYRKKLKEVW |
| | KPAV (SEQ ID NO: 105) |
| 279 | MQEIKRINKIRRRLVKDSNIKKAGKTGPMKTLLVRVMTPDLRERLENLRKKPEN |
| | IPQPISNTSRANLNKLLTDYTEMKKAILHVYWEEFQKDPVGLMSRVAQPAPKNI |
| | DQRKLIPVKDGNERLTSSGFACSQCCQPLYVYKLEQVNDKGKPHTNYFGRCNVS |
| | EHERLILLSPHKPEANDELVTYSLGKFGQRALDFYSIHVTRESNHPVKPLEQIG |
| | GNSCASGPVGKALSDACMGAVASFLTKYQDIILEHQKVIKKNEKRLANLKDIAS |
| | ANGLAFPKITLPPQPHTKEGIEAYNNVVAQIVIWVNLNLWQKLKIGRDEAKPLQ |
| | RLKGFPSFPLVERQANEVDWWDMVCNVKKLINEKKEDGKVFWQNLAGYKRQEAL |
| | RPYLSSEEDRKKGKKFARYQFGDLLLHLEKKHGEDWGKVYDEAWERIDKKVEGL |
| | SKHIKLEEERRSEDAQSKAALTDWLRAKASFVIEGLKEADKDEFCRCELKLQKW |
| | YGDLRGKPFAIEAENSILDISGFSKQYNCAFIWQKDGVKKLNLYLIINYFKGGK |
| | LRFKKIKPEAFEANRFYTVINKKSGEIVPMEVNFNFDDPNLIILPLAFGKRQGR |
| | EFIWNDLLSLETGSLKLANGRVIEKTLYNRRTRQDEPALFVALTFERREVLDSS |
| | NIKPMNLIGIDRGENIPAVIALTDPEGCPLSRFKDSLGNPTHILRIGESYKEKQ |
| | RTIQAKKEVEQRRAGGYSRKYASKAKNLADDMVRNTARDLLYYAVTQDAMLIFE |
| | NLSRGFGRQGKRTFMAERQYTRMEDWLTAKLAYEGLSKTYLSKTLAQYTSKTCS |
| | NCGFTITSADYDRVLEKLKKTATGWMTTINGKELKVEGQITYYNRYKRQNVVKD |
| | LSVELDRLSEESVNNDISSWTKGRSGEALSLLKKRFSHRPVQEKFVCLNCGFET |
| | HADEQAALNIARSWLFLRSQEYKKYQTNKTTGNTDKRAFVETWQSFYRKKLKEV |
| | WKPAV (SEQ ID NO: 106) |
| 280 | MQEIKRINKIRRRLVKDSNIKKAGKTGPMKTLLVRVMTPDLRERLENLRKKPEN |
| | IPQPISNTSRANLNKLLTDYTEMKKAILHVYWEEFQKDPVGLMSRVAQPAPKNI |
| | DQRKLIPVKDGNERLTSSGFACSQCCQPLYVYKLEQVNDKGKPHTNYFGRCNVS |
| | EHERLILLSPHKPEANDELVTYSLGKFGQRALDFYSIHVTRESNHPVKPLEQIG |
| | GNSCASGPVGKALSDACMGAVASFLTKYQDIILEHQKVIKKNEKRLANLKDIAS |
| | ANGLAFPKITLPPQPHTKEGIEAYNNVVAQIVIWVNLNLWQKLKIGRDEAKPLQ |
| | RLKGFPSFPLVERQANEVDWWDMVCNVKKLINEKKEDGKVFWQNLAGYKRQEAL |
| | RPYLSSEEDRKKGKKFARYQFGDLLLHLEKKHGEDWGKVYDEAWERIDKKVEGL |
| | SKHIKLEEERRSEDAQSKAALTDWLRAKASFVIEGLKEADKDEFCRCELKLQKW |
| | YGDLRGKPFAIEAENSILDISGFSKQYNCAFIWQKDGVKKLNLYLIINYFKGGK |
| | LRFKKIKPEAFEANRFYTVINKKSGEIVPMEVNFNFDDPNLIILPLAFGKRQGR |
| | EFIWNDLLSLETGSLKLANGRVIEKTLYNRRTRQDEPALFVALTFERREVLDSS |
| | NIKPMNLIGIDRGENIPAVIALTDPEGCPLSRFKDSLGNPTHILRIGESYKEKQ |
| | RTIQAKKEVEQRRAGGYSRKYASKAKNLADDMVRNTARDLLYYAVTQDAMLIFE |
| | NLSRGFGRQGKRTFMAERQYTRMEDWLTAKLAYEGLSKTYLSKTLAQYTSKTCS |
| | NCGFTITSADYDRVLEKLKKTATGWMTTINGKELKVEGQITYYNRYKRQNVVKD |
| | LSVELDRLSEESVNNDISSWTKGRSGEALSLLKKRFSHRPVQEKFVCLNCGFET |
| | HADEQAALNIARSWLFLRSQEYKKYQTNKTTGNTDKRAFVETWQSFYRKKLKEV |
| | WKPAV (SEQ ID NO: 107) |
| 285 | MQEIKRINKIRRRLVKDSNIKKAGKTGPMKTLLVRVMTPDLRERLENLRKKPEN |
| | IPQPISNTSRANLNKLLTDYTEMKKAILHVYWEEFQKDPVGLMSRVAQPAPKNI |
| | DQRKLIPVKDGNERLTSSGFACSQCCQPLYVYKLEQVNDKGKPHTNYFGRCNVS |
| | EHERLILLSPHKPEANDELVTYSLGKFGQRALDFYSIHVTRESNHPVKPLEQIG |
| | GNSCASGPVGKALSDACMGAVASFLTKYQDIILEHQKVIKKNEKRLANLKDIAS |
| | ANGLAFPKITLPPQPHTKEGIEAYNNVVAQIVIWVNLNLWQKLKIGRDEAKPLQ |
| | RLKGFPSFPLVERQANEVDWWDMVCNVKKLINEKKEDGKVFWQNLAGYKRQEAL |
| | RPYLSSEEDRKKGKKFARYQFGDLLLHLEKKHGEDWGKVYDEAWERIDKKVEGL |
| | SKHIKLEEERRSEDAQSKAALTDWLRAKASFVIEGLKEADKDEFCRCELKLQKW |
| | YGDLRGKPFAIEAENSILDISGFSKQYNCAFIWQKDGVKKLNLYLIINYFKGGK |
| | LRFKKIKPEAFEANRFYTVINKKSGEIVPMEVNFNFDDPNLIILPLAFGKRQGR |
| | EFIWNDLLSLETGSLKLANGRVIEKTLYNRRTRQDEPALFVALTFERREVLDSS |
| | NIKPMNLIGIDRGENIPAVIALTDPEGCPLSRFKDSLGNPTHILRIGESYKEKQ |
| | RTIQAKKEVEQRRAGGYSRKYASKAKNLADDMVRNTARDLLYYAVTQDAMLIFE |
| | NLSRGFGRQGKRTFMAERQYTRMEDWLTAKLAYEGLSKTYLSKTLAQYTSKTCS |
| | NCGFTITSADYDRVLEKLKKTATGWMTTINGKELKVEGQITYYNRYKRQNVVKD |
| | LSVELDRLSEESVNNDISSWTKGRSGEALSLLKKRFSHRPVQEKFVCLNCGFET |
| | HADEQAALNIARSWLFLRSQEYKKYQTNKTTGNTDKRAFVETWQSFYRKKLKEV |
| | WKPAV (SEQ ID NO: 108) |
| 286 | MQEIKRINKIRRRLVKDSNIKKAGKTGPMKTLLVRVMTPDLRERLENLRKKPEN |
| | IPQPISNTSRANLNKLLTDYTEMKKAILHVYWEEFQKDPVGLMSRVAQPAPKNI |
| | DQRKLIPVKDGNERLTSSGFACSQCCQPLYVYKLEQVNDKGKPHTNYFGRCNVS |
| | EHERLILLSPHKPEANDELVTYSLGKFGQRALDFYSIHVTRESNHPVKPLEQIG |
| | GNSCASGPVGKALSDACMGAVASFLTKYQDIILEHQKVIKKNEKRLANLKDIAS |
| | ANGLAFPKITLPPQPHTKEGIEAYNNVVAQIVIWVNLNLWQKLKIGRDEAKPLQ |
| | RLKGFPSFPLVERQANEVDWWDMVCNVKKLINEKKEDGKVFWQNLAGYKRQEAL |
| | RPYLSSEEDRKKGKKFARYQFGDLLLHLEKKHGEDWGKVYDEAWERIDKKVEGL |
| | SKHIKLEEERRSEDAQSKAALTDWLRAKASFVIEGLKEADKDEFCRCELKLQKW |
| | YGDLRGKPFAIEAENSILDISGFSKQYNCAFIWQKDGVKKLNLYLIINYFKGGK |
| | LRFKKIKPEAFEANRFYTVINKKSGEIVPMEVNFNFDDPNLIILPLAFGKRQGR |
| | EFIWNDLLSLETGSLKLANGRVIEKTLYNRRTRQDEPALFVALTFERREVLDSS |
| | NIKPMNLIGIDRGENIPAVIALTDPEGCPLSRFKDSLGNPTHILRIGESYKEKQ |
| | RTIQAKKEVEQRRAGGYSRKYASKAKNLADDMVRNTARDLLYYAVTQDAMLIFE |
| | NLSRGFGRQGKRTFMAERQYTRMEDWLTAKLAYEGLSKTYLSKTLAQYTSKTCS |
| | NCGFTITSADYDRVLEKLKKTATGWMTTINGKELKVEGQITYYNRYKRQNVVKD |
| | LSVELDRLSEESVNNDISSWTKGRSGEALSLLKKRFSHRPVQEKFVCLNCGFET |
| | HADEQAALNIARSWLFLRSQEYKKYQTNKTTGNTDKRAFVETWQSFYRKKLKEV |
| | WKPAV (SEQ ID NO: 109) |
| 287 | MQEIKRINKIRRRLVKDSNIKKAGKTGPMKTLLVRVMTPDLRERLENLRKKPEN |
| | IPQPISNTSRANLNKLLTDYTEMKKAILHVYWEEFQKDPVGLMSRVAQPAPKNI |
| | DQRKLIPVKDGNERLTSSGFACSQCCQPLYVYKLEQVNDKGKPHTNYFGRCNVS |
| | EHERLILLSPHKPEANDELVTYSLGKFGQRALDFYSIHVTRESNHPVKPLEQIG |
| | GNSCASGPVGKALSDACMGAVASFLTKYQDIILEHQKVIKKNEKRLANLKDIAS |
| | ANGLAFPKITLPPQPHTKEGIEAYNNVVAQIVIWVNLNLWQKLKIGRDEAKPLQ |
| | RLKGFPSFPLVERQANEVDWWDMVCNVKKLINEKKEDGKVFWQNLAGYKRQEAL |
| | RPYLSSEEDRKKGKKFARYQFGDLLLHLEKKHGEDWGKVYDEAWERIDKKVEGL |
| | SKHIKLEEERRSEDAQSKAALTDWLRAKASFVIEGLKEADKDEFCRCELKLQKW |
| | YGDLRGKPFAIEAENSILDISGFSKQYNCAFIWQKDGVKKLNLYLIINYFKGGK |
| | LRFKKIKPEAFEANRFYTVINKKSGEIVPMEVNFNFDDPNLIILPLAFGKRQGR |
| | EFIWNDLLSLETGSLKLANGRVIEKTLYNRRTRQDEPALFVALTFERREVLDSS |
| | NIKPMNLIGIDRGENIPAVIALTDPEGCPLSRFKDSLGNPTHILRIGESYKEKQ |
| | RTIQAKKEVEQRRAGGYSRKYASKAKNLADDMVRNTARDLLYYAVTQDAMLIFE |
| | NLSRGFGRQGKRTFMAERQYTRMEDWLTAKLAYEGLSKTYLSKTLAQYTSKTCS |
| | NCGFTITSADYDRVLEKLKKTATGWMTTINGKELKVEGQITYYNRYKRQNVVKD |
| | LSVELDRLSEESVNNDISSWTKGRSGEALSLLKKRFSHRPVQEKFVCLNCGFET |
| | HADEQAALNIARSWLFLRSQEYKKYQTNKTTGNTDKRAFVETWQSFYRKKLKEV |
| | WKPAV (SEQ ID NO: 110) |
| 288 | MQEIKRINKIRRRLVKDSNIKKAGKTGPMKTLLVRVMTPDLRERLENLRKKPEN |
| | IPQPISNTSRANLNKLLTDYTEMKKAILHVYWEEFQKDPVGLMSRVAQPAPKNI |
| | DQRKLIPVKDGNERLTMSSGFACSQCCQPLYVYKLEQVNDKGKPHTNYFGRCNV |
| | SEHERLILLSPHKPEANDELVTYSLGKFGQRALDFYSIHVTRESNHPVKPLEQI |
| | GGNSCASGPVGKALSDACMGAVASFLTKYQDIILEHQKVIKKNEKRLANLKDIA |
| | SANGLAFPKITLPPQPHTKEGIEAYNNVVAQIVIWVNLNLWQKLKIGRDEAKPL |
| | QRLKGFPSFPLVERQANEVDWWDMVCNVKKLINEKKEDGKVFWQNLAGYKRQEA |
| | LRPYLSSEEDRKKGKKFARYQFGDLLLHLEKKHGEDWGKVYDEAWERIDKKVEG |
| | LSKHIKLEEERRSEDAQSKAALTDWLRAKASFVIEGLKEADKDEFCRCELKLQK |
| | WYGDLRGKPFAIEAENSILDISGFSKQYNCAFIWQKDGVKKLNLYLIINYFKGG |
| | KLRFKKIKPEAFEANRFYTVINKKSGEIVPMEVNFNFDDPNLIILPLAFGKRQG |
| | REFIWNDLLSLETGSLKLANGRVIEKTLYNRRTRQDEPALFVALTFERREVLDS |
| | SNIKPMNLIGIDRGENIPAVIALTDPEGCPLSRFKDSLGNPTHILRIGESYKEK |
| | QRTIQAKKEVEQRRAGGYSRKYASKAKNLADDMVRNTARDLLYYAVTQDAMLIF |
| | ENLSRGFGRQGKRTFMAERQYTRMEDWLTAKLAYEGLSKTYLSKTLAQYTSKTC |
| | SNCGFTITSADYDRVLEKLKKTATGWMTTINGKELKVEGQITYYNRYKRQNVVK |
| | DLSVELDRLSEESVNNDISSWTKGRSGEALSLLKKRFSHRPVQEKFVCLNCGFE |
| | THADEQAALNIARSWLFLRSQEYKKYQTNKTTGNTDKRAFVETWQSFYRKKLKE |
| | VWKPAV (SEQ ID NO: 111) |
| 290 | MQEIKRINKIRRRLVKDSNIKKAGKTGPMKTLLVRVMTPDLRERLENLRKKPEN |
| | IPQPISNTSRANLNKLLTDYTEMKKAILHVYWEEFQKDPVGLMSRVAQPAPKNI |
| | DQRKLIPVKDGNERLTSSGFACSQCCQPLYVYKLEQVNDKGKPHTNYFGRCNVS |
| | EHERLILLSPHKPEANDELVTYSLGKFGQRALDFYSIHVTRESNHPVKPLEQIG |
| | GNSCASGPVGKALSDACMGAVASFLTKYQDIILEHQKVIKKNEKRLANLKDIAS |
| | ANGLAFPKITLPPQPHTKEGIEAYNNVVAQIVIWVNLNLWQKLKIGRDEAKPLQ |
| | RLKGFPSFPLVERQANEVDWWDMVCNVKKLINEKKEDGKVFWQNLAGYKRQEAL |
| | RPYLSSEEDRKKGKKFARYQFGDLLLHLEKKHGEDWGKVYDEAWERIDKKVEGL |
| | SKHIKLEEERRSEDAQSKAALTDWLRAKASFVIEGLKEADKDEFCRCELKLQKW |
| | YGDLRGKPFAIEAENSILDISGFSKQYNCAFIWQKDGVKKLNLYLIINYFKGGK |
| | LRFKKIKPEAFEANRFYTVINKKSGEIVPMEVNFNFDDPNLIILPLAFGKRQGR |
| | EFIWNDLLSLETGSLKLANGRVIEKTLYNRRTRQDEPALFVALTFERREVLDSS |
| | NIKPMNLIGIDRGENIPAVIALTDPEGCPLSRFKDSLGNPTHILRIGESYKEKQ |
| | RTIQAKKEVEQRRAGGYSRKYASKAKNLADDMVRNTARDLLYYAVTQDAMLIFE |
| | NLSRGFGRQGKRTFMAERQYTRMEDWLTAKLAYEGLSKTYLSKTLAQYTSKTCS |
| | NCGFTITSADYDRVLEKLKKTATGWMTTINGKELKVEGQITYYNRYKRQNVVKD |
| | LSVELDRLSEESVNNDISSWTKGRSGEALSLLKKRFSHRPVQEKFVCLNCGFET |
| | HADEQAALNIARSWLFLRSQEYKKYQTNKTTGNTDKRAFVETWQSFYRKKLKEV |
| | WKPAV (SEQ ID NO: 112) |
| 291 | MQEIKRINKIRRRLVKDSNIKKAGKTGPMKTLLVRVMTPDLRERLENLRKKPEN |
| | IPQPISNTSRANLNKLLTDYTEMKKAILHVYWEEFQKDPVGLMSRVAQPAPKNI |
| | DQRKLIPVKDGNERLTSSGFACSQCCQPLYVYKLEQVNDKGKPHTNYFGRCNVS |
| | EHERLILLSPHKPEANDELVTYSLGKFGQRALDFYSIHVTRESNHPVKPLEQIG |
| | GNSCASGPVGKALSDACMGAVASFLTKYQDIILEHQKVIKKNEKRLANLKDIAS |
| | ANGLAFPKITLPPQPHTKEGIEAYNNVVAQIVIWVNLNLWQKLKIGRDEAKPLQ |
| | RLKGFPSFPLVERQANEVDWWDMVCNVKKLINEKKEDGKVFWQNLAGYKRQEAL |
| | RPYLSSEEDRKKGKKFARYQFGDLLLHLEKKHGEDWGKVYDEAWERIDKKVEGL |
| | SKHIKLEEERRSEDAQSKAALTDWLRAKASFVIEGLKEADKDEFCRCELKLQKW |
| | YGDLRGKPFAIEAENSILDISGFSKQYNCAFIWQKDGVKKLNLYLIINYFKGGK |
| | LRFKKIKPEAFEANRFYTVINKKSGEIVPMEVNFNFDDPNLIILPLAFGKRQGR |
| | EFIWNDLLSLETGSLKLANGRVIEKTLYNRRTRQDEPALFVALTFERREVLDSS |
| | NIKPMNLIGIDRGENIPAVIALTDPEGCPLSRFKDSLGNPTHILRIGESYKEKQ |
| | RTIQAKKEVEQRRAGGYSRKYASKAKNLADDMVRNTARDLLYYAVTQDAMLIFE |
| | NLSRGFGRQGKRTFMAERQYTRMEDWLTAKLAYEGLSKTYLSKTLAQYTSKTCS |
| | NCGFTITSADYDRVLEKLKKTATGWMTTINGKELKVEGQITYYNRYKRQNVVKD |
| | LSVELDRLSEESVNNDISSWTKGRSGEALSLLKKRFSHRPVQEKFVCLNCGFET |
| | HADEQAALNIARSWLFLRSQEYKKYQTNKTTGNTDKRAFVETWQSFYRKKLKEV |
| | WKPAV (SEQ ID NO: 113) |
| 293 | MQEIKRINKIRRRLVKDSNIKKAGKTGPMKTLLVRVMTPDLRERLENLRKKPEN |
| | IPQPISNTSRANLNKLLTDYTEMKKAILHVYWEEFQKDPVGLMSRVAQPAPKNI |
| | DQRKLIPVKDGNERLTSSGFACSQCCQPLYVYKLEQVNDKGKPHTNYFGRCNVS |
| | EHERLILLSPHKPEANDELVTYSLGKFGQRALDFYSIHVTRESNHPVKPLEQIG |
| | GNSCASGPVGKALSDACMGAVASFLTKYQDIILEHQKVIKKNEKRLANLKDIAS |
| | ANGLAFPKITLPPQPHTKEGIEAYNNVVAQIVIWVNLNLWQKLKIGRDEAKPLQ |
| | RLKGFPSFPLVERQANEVDWWDMVCNVKKLINEKKEDGKVFWQNLAGYKRQEAL |
| | RPYLSSEEDRKKGKKFARYQFGDLLLHLEKKHGEDWGKVYDEAWERIDKKVEGL |
| | SKHIKLEEERRSEDAQSKAALTDWLRAKASFVIEGLKEADKDEFCRCELKLQKW |
| | YGDLRGKPFAIEAENSILDISGFSKQYNCAFIWQKDGVKKLNLYLIINYFKGGK |
| | LRFKKIKPEAFEANRFYTVINKKSGEIVPMEVNFNFDDPNLIILPLAFGKRQGR |
| | EFIWNDLLSLETGSLKLANGRVIEKTLYNRRTRQDEPALFVALTFERREVLDSS |
| | NIKPMNLIGIDRGENIPAVIALTDPEGCPLSRFKDSLGNPTHILRIGESYKEKQ |
| | RTIQAKKEVEQRRAGGYSRKYASKAKNLADDMVRNTARDLLYYAVTQDAMLIFE |
| | NLSRGFGRQGKRTFMAERQYTRMEDWLTAKLAYEGLSKTYLSKTLAQYTSKTCS |
| | NCGFTITSADYDRVLEKLKKTATGWMTTINGKELKVEGQITYYNRYKRQNVVKD |
| | LSVELDRLSEESVNNDISSWTKGRSGEALSLLKKRFSHRPVQEKFVCLNCGFET |
| | HADEQAALNIARSWLFLRSQEYKKYQTNKTTGNTDKRAFVETWQSFYRKKLKEV |
| | WKPAV (SEQ ID NO: 114) |
| 300 | MQEIKRINKIRRRLVKDSNIKKAGKTGPMKTLLVRVMTPDLRERLENLRKKPEN |
| | IPQPISNTSRANLNKLLTDYTEMKKAILHVYWEEFQKDPVGLMSRVAQPAPKNI |
| | DQRKLIPVKDGNERLTSSGFACSQCCQPLYVYKLEQVNDKGKPHTNYFGRCNVS |
| | EHERLILLSPHKPEANDELVTYSLGKFGQRALDFYSIHVTRESNHPVKPLEQIG |
| | GNSCASGPVGKALSDACMGAVASFLTKYQDIILEHQKVIKKNEKRLANLKDIAS |
| | ANGLAFPKITLPPQPHTKEGIEAYNNVVAQIVIWVNLNLWQKLKIGRDEAKPLQ |
| | RLKGFPSFPLVERQANEVDWWDMVCNVKKLINEKKEDGKVFWQNLAGYKRQEAL |
| | RPYLSSEEDRKKGKKFARYQFGDLLLHLEKKHGEDWGKVYDEAWERIDKKVEGL |
| | SKHIKLEEERRSEDAQSKAALTDWLRAKASFVIEGLKEADKDEFCRCELKLQKW |
| | YGDLRGKPFAIEAENSILDISGFSKQYNCAFIWQKDGVKKLNLYLIINYFKGGK |
| | LRFKKIKPEAFEANRFYTVINKKSGEIVPMEVNFNFDDPNLIILPLAFGKRQGR |
| | EFIWNDLLSLETGSLKLANGRVIEKTLYNRRTRQDEPALFVALTFERREVLDSS |
| | NIKPMNLIGIDRGENIPAVIALTDPEGCPLSRFKDSLGNPTHILRIGESYKEKQ |
| | RTIQAKKEVEQRRAGGYSRKYASKAKNLADDMVRNTARDLLYYAVTQDAMLIFE |
| | NLSRGFGRQGKRTFMAERQYTRMEDWLTAKLAYEGLSKTYLSKTLAQYTSKTCS |
| | NCGFTITSADYDRVLEKLKKTATGWMTTINGKELKVEGQITYYNRYKRQNVVKD |
| | LSVELDRLSEESVNNDISSWTKGRSGEALSLLKKRFSHRPVQEKFVCLNCGFET |
| | HADEQAALNIARSWLFLRSQEYKKYQTNKTTGNTDKRAFVETWQSFYRKKLKEV |
| | WKPAV (SEQ ID NO: 115) |
| 492 | MQEIKRINKIRRRLVKDSNIKKAGKTGPMKTLLVRVMTPDLRERLENLRKKPEN |
| | IPQPISNTSRANLNKLLTDYTEMKKAILHVYWEEFQKDPVGLMSRVAQPAPKNI |
| | DQRKLIPVKDGNERLTSSGFACSQCCQPLYVYKLEQVNDKGKPHTNYFGRCNVS |
| | EHERLILLSPHKPEANDELVTYSLGKFGQRALDFYSIHVTRESNHPVKPLEQIG |
| | GNSCASGPVGKALSDACMGAVASFLTKYQDIILEHQKVIKKNEKRLANLKDIAS |
| | ANGLAFPKITLPPQPHTKEGIEAYNNVVAQIVIWVNLNLWQKLKIGRDEAKPLQ |
| | RLKGFPSFPLVERQANEVDWWDMVCNVKKLINEKKEDGKVFWQNLAGYKRQEAL |
| | RPYLSSEEDRKKGKKFARYQFGDLLLHLEKKHGEDWGKVYDEAWERIDKKVEGL |
| | SKHIKLEEERRSEDAQSKAALTDWLRAKASFVIEGLKEADKDEFCRCELKLQKW |
| | YGDLRGKPFAIEAENSILDISGFSKQYNCAFIWQKDGVKKLNLYLIINYFKGGK |
| | LRFKKIKPEAFEANRFYTVINKKSGEIVPMEVNFNFDDPNLIILPLAFGKRQGR |
| | EFIWNDLLSLETGSLKLANGRVIEKTLYNRRTRQDEPALFVALTFERREVLDSS |
| | NIKPMNLIGIDRGENIPAVIALTDPEGCPLSRFKDSLGNPTHILRIGESYKEKQ |
| | RTIQAKKEVEQRRAGGYSRKYASKAKNLADDMVRNTARDLLYYAVTQDAMLIFE |
| | NLSRGFGRQGKRTFMAERQYTRMEDWLTAKLAYEGLSKTYLSKTLAQYTSKTCS |
| | NCGFTITSADYDRVLEKLKKTATGWMTTINGKELKVEGQITYYNRYKRQNVVKD |
| | LSVELDRLSEESVNNDISSWTKGRSGEALSLLKKRFSHRPVQEKFVCLNCGFET |
| | HADEQAALNIARSWLFLRSQEYKKYQTNKTTGNTDKRAFVETWQSFYRKKLKEV |
| | WKPAV (SEQ ID NO: 116) |
| 493 | MQEIKRINKIRRRLVKDSNIKKAGKTGPMKTLLVRVMTPDLRERLENLRKKPEN |
| | IPQPISNTSRANLNKLLTDYTEMKKAILHVYWEEFQKDPVGLMSRVAQPAPKNI |
| | DQRKLIPVKDGNERLTSSGFACSQCCQPLYVYKLEQVNDKGKPHTNYFGRCNVS |
| | EHERLILLSPHKPEANDELVTYSLGKFGQRALDFYSIHVTRESNHPVKPLEQIG |
| | GNSCASGPVGKALSDACMGAVASFLTKYQDIILEHQKVIKKNEKRLANLKDIAS |
| | ANGLAFPKITLPPQPHTKEGIEAYNNVVAQIVIWVNLNLWQKLKIGRDEAKPLQ |
| | RLKGFPSFPLVERQANEVDWWDMVCNVKKLINEKKEDGKVFWQNLAGYKRQEAL |
| | RPYLSSEEDRKKGKKFARYQFGDLLLHLEKKHGEDWGKVYDEAWERIDKKVEGL |
| | SKHIKLEEERRSEDAQSKAALTDWLRAKASFVIEGLKEADKDEFCRCELKLQKW |
| | YGDLRGKPFAIEAENSILDISGFSKQYNCAFIWQKDGVKKLNLYLIINYFKGGK |
| | LRFKKIKPEAFEANRFYTVINKKSGEIVPMEVNFNFDDPNLIILPLAFGKRQGR |
| | EFIWNDLLSLETGSLKLANGRVIEKTLYNRRTRQDEPALFVALTFERREVLDSS |
| | NIKPMNLIGIDRGENIPAVIALTDPEGCPLSRFKDSLGNPTHILRIGESYKEKQ |
| | RTIQAKKEVEQRRAGGYSRKYASKAKNLADDMVRNTARDLLYYAVTQDAMLIFE |
| | NLSRGFGRQGKRTFMAERQYTRMEDWLTAKLAYEGLSKTYLSKTLAQYTSKTCS |
| | NCGFTITSADYDRVLEKLKKTATGWMTTINGKELKVEGQITYYNRYKRQNVVKD |
| | LSVELDRLSEESVNNDISSWTKGRSGEALSLLKKRFSHRPVQEKFVCLNCGFET |
| | HADEQAALNIARSWLFLRSQEYKKYQTNKTTGNTDKRAFVETWQSFYRKKLKEV |
| | WKPAV (SEQ ID NO: 117) |
| 387: | QEIKRINKIRRRLVKDSNIKKAGKTGPMKTLLVRVMTPDLRERLENLRKKPENI |
| NTSB swap | PQPISNTSRANLNKLLTDYTEMKKAILHVYWEEFQKDPVGLMSRVAQPASKKID |
| from SEQ ID | QNKLKPEMDEKGNLTTAGFACSQCGQPLFVYKLEQVSEKGKAYTNYFGRCNVAE |
| NO: 1 | HEKLILLAQLKPEKDSDEAVTYSLGKFGQRALDFYSIHVTRESNHPVKPLEQIG |
| | GNSCASGPVGKALSDACMGAVASFLTKYQDIILEHQKVIKKNEKRLANLKDIAS |
| | ANGLAFPKITLPPQPHTKEGIEAYNNVVAQIVIWVNLNLWQKLKIGRDEAKPLQ |
| | RLKGFPSFPLVERQANEVDWWDMVCNVKKLINEKKEDGKVFWQNLAGYKRQEAL |
| | RPYLSSEEDRKKGKKFARYQFGDLLLHLEKKHGEDWGKVYDEAWERIDKKVEGL |
| | SKHIKLEEERRSEDAQSKAALTDWLRAKASFVIEGLKEADKDEFCRCELKLQKW |
| | YGDLRGKPFAIEAENSILDISGFSKQYNCAFIWQKDGVKKLNLYLIINYFKGGK |
| | LRFKKIKPEAFEANRFYTVINKKSGEIVPMEVNFNFDDPNLIILPLAFGKRQGR |
| | EFIWNDLLSLETGSLKLANGRVIEKTLYNRRTRQDEPALFVALTFERREVLDSS |
| | NIKPMNLIGIDRGENIPAVIALTDPEGCPLSRFKDSLGNPTHILRIGESYKEKQ |
| | RTIQAKKEVEQRRAGGYSRKYASKAKNLADDMVRNTARDLLYYAVTQDAMLIFE |
| | NLSRGFGRQGKRTFMAERQYTRMEDWLTAKLAYEGLSKTYLSKTLAQYTSKTCS |
| | NCGFTITSADYDRVLEKLKKTATGWMTTINGKELKVEGQITYYNRYKRQNVVKD |
| | LSVELDRLSEESVNNDISSWTKGRSGEALSLLKKRFSHRPVQEKFVCLNCGFET |
| | HADEQAALNIARSWLFLRSQEYKKYQTNKTTGNTDKRAFVETWQSFYRKKLKEV |
| | WKPAV (SEQ ID NO: 118) |
| 395: | QEIKRINKIRRRLVKDSNIKKAGKTGPMKTLLVRVMTPDLRERLENLRKKPENI |
| Helical 1B | PQPISNTSRANLNKLLTDYTEMKKAILHVYWEEFQKDPVGLMSRVAQPAPKNID |
| swap from | QRKLIPVKDGNERLTSSGFACSQCCQPLYVYKLEQVNDKGKPHTNYFGRCNVSE |
| SEQ ID NO: | HERLILLSPHKPEANDELVTYSLGKFGQRALDFYSIHVTKESTHPVKPLAQIAG |
| 1 | NRYASGPVGKALSDACMGTIASFLSKYQDIIIEHQKVVKGNQKRLESLRELAGK |
| | ENLEYPSVTLPPQPHTKEGVDAYNEVIARVRMWVNLNLWQKLKLSRDDAKPLLR |
| | LKGFPSFPLVERQANEVDWWDMVCNVKKLINEKKEDGKVFWQNLAGYKRQEALR |
| | PYLSSEEDRKKGKKFARYQFGDLLLHLEKKHGEDWGKVYDEAWERIDKKVEGLS |
| | KHIKLEEERRSEDAQSKAALTDWLRAKASFVIEGLKEADKDEFCRCELKLQKWY |
| | GDLRGKPFAIEAENSILDISGFSKQYNCAFIWQKDGVKKLNLYLIINYFKGGKL |
| | RFKKIKPEAFEANRFYTVINKKSGEIVPMEVNFNFDDPNLIILPLAFGKRQGRE |
| | FIWNDLLSLETGSLKLANGRVIEKTLYNRRTRQDEPALFVALTFERREVLDSSN |
| | IKPMNLIGIDRGENIPAVIALTDPEGCPLSRFKDSLGNPTHILRIGESYKEKQR |
| | TIQAKKEVEQRRAGGYSRKYASKAKNLADDMVRNTARDLLYYAVTQDAMLIFEN |
| | LSRGFGRQGKRTFMAERQYTRMEDWLTAKLAYEGLSKTYLSKTLAQYTSKTCSN |
| | CGFTITSADYDRVLEKLKKTATGWMTTINGKELKVEGQITYYNRYKRQNVVKDL |
| | SVELDRLSEESVNNDISSWTKGRSGEALSLLKKRFSHRPVQEKFVCLNCGFETH |
| | ADEQAALNIARSWLFLRSQEYKKYQTNKTTGNTDKRAFVETWQSFYRKKLKEVW |
| | KPAV (SEQ ID NO: 119) |
| 485: | QEIKRINKIRRRLVKDSNTKKAGKTGPMKTLLVRVMTPDLRERLENLRKKPENI |
| Helical 1B | PQPISNTSRANLNKLLTDYTEMKKAILHVYWEEFQKDPVGLMSRVAQPAPKNID |
| swap from | QRKLIPVKDGNERLTSSGFACSQCCQPLYVYKLEQVNDKGKPHTNYFGRCNVSE |
| SEQ ID NO: | HERLILLSPHKPEANDELVTYSLGKFGQRALDFYSIHVTKESTHPVKPLAQIAG |
| 1 | NRYASGPVGKALSDACMGTIASFLSKYQDIIIEHQKVVKGNQKRLESLRELAGK |
| | ENLEYPSVTLPPQPHTKEGVDAYNEVIARVRMWVNLNLWQKLKLSRDDAKPLLR |
| | LKGFPSFPLVERQANEVDWWDMVCNVKKLINEKKEDGKVFWQNLAGYKRQEALR |
| | PYLSSEEDRKKGKKFARYQLGDLLLHLEKKHGEDWGKVYDEAWERIDKKVEGLS |
| | KHIKLEEERRSEDAQSKAALTDWLRAKASFVIEGLKEADKDEFCRCELKLQKWY |
| | GDLRGKPFAIEAENSILDISGFSKQYNCAFIWQKDGVKKLNLYLIINYFKGGKL |
| | RFKKIKPEAFEANRFYTVINKKSGEIVPMEVNFNFDDPNLIILPLAFGKRQGRE |
| | FIWNDLLSLETGSLKLANGRVIEKTLYNRRTRQDEPALFVALTFERREVLDSSN |
| | IKPMNLIGVDRGENIPAVIALTDPEGCPLSRFKDSLGNPTHILRIGESYKEKQR |
| | TIQAKKEVEQRRAGGYSRKYASKAKNLADDMVRNTARDLLYYAVTQDAMLIFEN |
| | LSRGFGRQGKRTFMAERQYTRMEDWLTAKLAYEGLSKTYLSKTLAQYTSKTCSN |
| | CGFTITSADYDRVLEKLKKTATGWMTTINGKELKVEGQITYYNRRKRQNVVKDL |
| | SVELDRLSEESVNNDISSWTKGRSGEALSLLKKRFSHRPVQEKFVCLNCGFETH |
| | ADEQAALNIARSWLFLRSQEYKKYQTNKTTGNTDKRAFVETWQSFYRKKLKEVW |
| | KPAV (SEQ ID NO: 120) |
| 486: | QEIKRINKIRRRLVKDSNTKKAGKTGPMKTLLVRVMTPDLRERLENLRKKPENI |
| Helical 1B | PQPISNTSRANLNKLLTDYTEMKKAILHVYWEEFQKDPVGLMSRVAQPAPKNID |
| swap from | QRKLIPVKDGNERLTSSGFACSQCCQPLYVYKLEQVNDKGKPHTNYFGRCNVSE |
| SEQ ID NO: | HERLILLSPHKPEANDELVTYSLGKFGQRALDFYSIHVTKESTHPVKPLAQIAG |
| 1 | NRYASGPVGKALSDACMGTIASFLSKYQDIIIEHQKVVKGNQKRLESLRELAGK |
| | ENLEYPSVTLPPQPHTKEGVDAYNEVIARVRMWVNLNLWQKLKLSRDDAKPLLR |
| | LKGFPSFPLVERQANEVDWWDMVCNVKKLINEKKEDGKVFWQNLAGYKRQEALR |
| | PYLSSEEDRKKGKKFARYQLGDLLKHLEKKHGEDWGKVYDEAWERIDKKVEGLS |
| | KHIKLEEERRSEDAQSKAALTDWLRAKASFVIEGLKEADKDEFCRCELKLQKWY |
| | GDLRGKPFAIEAENSILDISGFSKQYNCAFIWQKDGVKKLNLYLIINYFKGGKL |
| | RFKKIKPEAFEANRFYTVINKKSGEIVPMEVNFNFDDPNLIILPLAFGKRQGRE |
| | FIWNDLLSLETGSLKLANGRVIEKTLYNRRTRQDEPALFVALTFERREVLDSSN |
| | IKPMNLIGVDRGENIPAVIALTDPEGCPLSRFKDSLGNPTHILRIGESYKEKQR |
| | TIQAKKEVEQRRAGGYSRKYASKAKNLADDMVRNTARDLLYYAVTQDAMLIFEN |
| | LSRGFGRQGKRTFMAERQYTRMEDWLTAKLAYEGLSKTYLSKTLAQYTSKTCSN |
| | CGFTITSADYDRVLEKLKKTATGWMTTINGKELKVEGQITYYNRRKRQNVVKDL |
| | SVELDRLSEESVNNDISSWTKGRSGEALSLLKKRFSHRPVQEKFVCLNCGFETH |
| | ADEQAALNIARSWLFLRSQEYKKYQTNKTTGNTDKRAFVETWQSFYRKKLKEVW |
| | KPAV (SEQ ID NO: 121) |
| 487: | QEIKRINKIRRRLVKDSNTKKAGKTGPMKTLLVRVMTPDLRERLENLRKKPENI |
| Helical 1B | PQPISNTSRANLNKLLTDYTEMKKAILHVYWEEFQKDPVGLMSRVAQPAPKNID |
| swap from | QRKLIPVKDGNERLTSSGFACSQCCQPLYVYKLEQVNDKGKPHTNYFGRCNVSE |
| SEQ ID NO: | HERLILLSPHKPEANDELVTYSLGKFGQRALDFYSIHVTKESTHPVKPLAQIAG |
| 1 | NRYASGPVGKALSDACMGTIASFLSKYQDIIIEHQKVVKGNQKRLESLRELAGK |
| | ENLEYPSVTLPPQPHTKEGVDAYNEVIARVRMWVNLNLWQKLKLSRDDAKPLLR |
| | LKGFPSFPLVERQANEVDWWDMVCNVKKLINEKKEDGKVFWQNLAGYKRQEALR |
| | PYLSSEEDRKKGKKFARYQLGDLLLHLEKKHGEDWGKVYDEAWERIDKKVEGLS |
| | KHIKLEEERRSEDAQSKAALTDWLRAKASFVIEGLKEADKDEFCRCELKLQKWY |
| | GDLRGKPFAIEAENSILDISGFSKQYNCAFIWQKDGVKKLNLYLIINYFKGGKL |
| | RFKKIKPEAFEANRFYTVINKKSGEIVPMEVNFNFDDPNLIILPLAFGKRQGRE |
| | FIWNDLLSLETGSLKLANGRVIEKTLYNRRTRQDEPALFVALTFERREVLDSSN |
| | IKPMNLIGVDRGENIPAVIALTDPEGCPLSRFKDSLGNPTHILRIGESYKEKQR |
| | TIQAKKEVEQRRAGGYSRKYASKAKNLADDMVRNTARDLLYYAVTQDAMLIFEN |
| | LSRGFGRQGKRTFMAERQYTRMEDWLTAKLAYEGLSKTYLSKTLAQYTSKTCSN |
| | CGFTITSADYDRVLEKLKKTATGWMTTINGKELKVEGQITYYNRYKRQNVVKDL |
| | SVELDRLSEESVNNDISSWTKGRSGEALSLLKKRFSHRPVQEKFVCLNCGFETH |
| | ADEQAALNIARSWLFLRSQEYKKYQTNKTTGNTDKRAFVETWQSFYRKKLKEVW |
| | KPAV (SEQ ID NO: 122) |
| 488: | QEIKRINKIRRRLVKDSNTKKAGKTGPMKTLLVRVMTPDLRERLENLRKKPENI |
| NTSB and | PQPISNTSRANLNKLLTDYTEMKKAILHVYWEEFQKDPVGLMSRVAQPASKKID |
| Helical 1B | QNKLKPEMDEKGNLTTAGFACSQCGQPLFVYKLEQVSEKGKAYTNYFGRCNVAE |
| swap from | HEKLILLAQLKPEKDSDEAVTYSLGKFGQRALDFYSIHVTKESTHPVKPLAQIA |
| SEQ ID NO: | GNRYASGPVGKALSDACMGTIASFLSKYQDIIIEHQKVVKGNQKRLESLRELAG |
| 1 | KENLEYPSVTLPPQPHTKEGVDAYNEVIARVRMWVNLNLWQKLKLSRDDAKPLL |
| | RLKGFPSFPLVERQANEVDWWDMVCNVKKLINEKKEDGKVFWQNLAGYKRQEAL |
| | RPYLSSEEDRKKGKKFARYQFGDLLLHLEKKHGEDWGKVYDEAWERIDKKVEGL |
| | SKHIKLEEERRSEDAQSKAALTDWLRAKASFVIEGLKEADKDEFCRCELKLQKW |
| | YGDLRGKPFAIEAENSILDISGFSKQYNCAFIWQKDGVKKLNLYLIINYFKGGK |
| | LRFKKIKPEAFEANRFYTVINKKSGEIVPMEVNFNFDDPNLIILPLAFGKRQGR |
| | EFIWNDLLSLETGSLKLANGRVIEKTLYNRRTRQDEPALFVALTFERREVLDSS |
| | NIKPMNLIGIDRGENIPAVIALTDPEGCPLSRFKDSLGNPTHILRIGESYKEKQ |
| | RTIQAKKEVEQRRAGGYSRKYASKAKNLADDMVRNTARDLLYYAVTQDAMLIFE |
| | NLSRGFGRQGKRTFMAERQYTRMEDWLTAKLAYEGLSKTYLSKTLAQYTSKTCS |
| | NCGFTITSADYDRVLEKLKKTATGWMTTINGKELKVEGQITYYNRYKRQNVVKD |
| | LSVELDRLSEESVNNDISSWTKGRSGEALSLLKKRFSHRPVQEKFVCLNCGFET |
| | HADEQAALNIARSWLFLRSQEYKKYQTNKTTGNTDKRAFVETWQSFYRKKLKEV |
| | WKPAV (SEQ ID NO: 123) |
| 489: | QEIKRINKIRRRLVKDSNTKKAGKTGPMKTLLVRVMTPDLRERLENLRKKPENI |
| NTSB and | PQPISNTSRANLNKLLTDYTEMKKAILHVYWEEFQKDPVGLMSRVAQPASKKID |
| Helical 1B | QNKLKPEMDEKGNLTTAGFACSQCGQPLFVYKLEQVSEKGKAYTNYFGRCNVAE |
| swap from | HEKLILLAQLKPEKDSDEAVTYSLGKFGQRALDFYSIHVTKESTHPVKPLAQIA |
| SEQ ID NO: | GNRYASGPVGKALSDACMGTIASFLSKYQDIIIEHQKVVKGNQKRLESLRELAG |
| 1 | KENLEYPSVTLPPQPHTKEGVDAYNEVIARVRMWVNLNLWQKLKLSRDDAKPLL |
| | RLKGFPSFPLVERQANEVDWWDMVCNVKKLINEKKEDGKVFWQNLAGYKRQEAL |
| | RPYLSSEEDRKKGKKFARYQLGDLLLHLEKKHGEDWGKVYDEAWERIDKKVEGL |
| | SKHIKLEEERRSEDAQSKAALTDWLRAKASFVIEGLKEADKDEFCRCELKLQKW |
| | YGDLRGKPFAIEAENSILDISGFSKQYNCAFIWQKDGVKKLNLYLIINYFKGGK |
| | LRFKKIKPEAFEANRFYTVINKKSGEIVPMEVNFNFDDPNLIILPLAFGKRQGR |
| | EFIWNDLLSLETGSLKLANGRVIEKTLYNRRTRQDEPALFVALTFERREVLDSS |
| | NIKPMNLIGVDRGENIPAVIALTDPEGCPLSRFKDSLGNPTHILRIGESYKEKQ |
| | RTIQAKKEVEQRRAGGYSRKYASKAKNLADDMVRNTARDLLYYAVTQDAMLIFE |
| | NLSRGFGRQGKRTFMAERQYTRMEDWLTAKLAYEGLSKTYLSKTLAQYTSKTCS |
| | NCGFTITSADYDRVLEKLKKTATGWMTTINGKELKVEGQITYYNRRKRQNVVKD |
| | LSVELDRLSEESVNNDISSWTKGRSGEALSLLKKRFSHRPVQEKFVCLNCGFET |
| | HADEQAALNIARSWLFLRSQEYKKYQTNKTTGNTDKRAFVETWQSFYRKKLKEV |
| | WKPAV (SEQ ID NO: 124) |
| 490: | QEIKRINKIRRRLVKDSNTKKAGKTGPMKTLLVRVMTPDLRERLENLRKKPENI |
| NTSB and | PQPISNTSRANLNKLLTDYTEMKKAILHVYWEEFQKDPVGLMSRVAQPASKKID |
| Helical 1B | QNKLKPEMDEKGNLTTAGFACSQCGQPLFVYKLEQVSEKGKAYTNYFGRCNVAE |
| swap from | HEKLILLAQLKPEKDSDEAVTYSLGKFGQRALDFYSIHVTKESTHPVKPLAQIA |
| SEQ ID NO: | GNRYASGPVGKALSDACMGTIASFLSKYQDIIIEHQKVVKGNQKRLESLRELAG |
| 1 | KENLEYPSVTLPPQPHTKEGVDAYNEVIARVRMWVNLNLWQKLKLSRDDAKPLL |
| | RLKGFPSFPLVERQANEVDWWDMVCNVKKLINEKKEDGKVFWQNLAGYKRQEAL |
| | RPYLSSEEDRKKGKKFARYQLGDLLKHLEKKHGEDWGKVYDEAWERIDKKVEGL |
| | SKHIKLEEERRSEDAQSKAALTDWLRAKASFVIEGLKEADKDEFCRCELKLQKW |
| | YGDLRGKPFAIEAENSILDISGFSKQYNCAFIWQKDGVKKLNLYLIINYFKGGK |
| | LRFKKIKPEAFEANRFYTVINKKSGEIVPMEVNFNFDDPNLIILPLAFGKRQGR |
| | EFIWNDLLSLETGSLKLANGRVIEKTLYNRRTRQDEPALFVALTFERREVLDSS |
| | NIKPMNLIGVDRGENIPAVIALTDPEGCPLSRFKDSLGNPTHILRIGESYKEKQ |
| | RTIQAKKEVEQRRAGGYSRKYASKAKNLADDMVRNTARDLLYYAVTQDAMLIFE |
| | NLSRGFGRQGKRTFMAERQYTRMEDWLTAKLAYEGLSKTYLSKTLAQYTSKTCS |
| | NCGFTITSADYDRVLEKLKKTATGWMTTINGKELKVEGQITYYNRRKRQNVVKD |
| | LSVELDRLSEESVNNDISSWTKGRSGEALSLLKKRFSHRPVQEKFVCLNCGFET |
| | HADEQAALNIARSWLFLRSQEYKKYQTNKTTGNTDKRAFVETWQSFYRKKLKEV |
| | WKPAV (SEQ ID NO: 125) |
| 491: | QEIKRINKIRRRLVKDSNTKKAGKTGPMKTLLVRVMTPDLRERLENLRKKPENI |
| NTSB and | PQPISNTSRANLNKLLTDYTEMKKAILHVYWEEFQKDPVGLMSRVAQPASKKID |
| Helical 1B | QNKLKPEMDEKGNLTTAGFACSQCGQPLFVYKLEQVSEKGKAYTNYFGRCNVAE |
| swap from | HEKLILLAQLKPEKDSDEAVTYSLGKFGQRALDFYSIHVTKESTHPVKPLAQIA |
| SEQ ID NO: | GNRYASGPVGKALSDACMGTIASFLSKYQDIIIEHQKVVKGNQKRLESLRELAG |
| 1 | KENLEYPSVTLPPQPHTKEGVDAYNEVIARVRMWVNLNLWQKLKLSRDDAKPLL |
| | RLKGFPSFPLVERQANEVDWWDMVCNVKKLINEKKEDGKVFWQNLAGYKRQEAL |
| | RPYLSSEEDRKKGKKFARYQLGDLLLHLEKKHGEDWGKVYDEAWERIDKKVEGL |
| | SKHIKLEEERRSEDAQSKAALTDWLRAKASFVIEGLKEADKDEFCRCELKLQKW |
| | YGDLRGKPFAIEAENSILDISGFSKQYNCAFIWQKDGVKKLNLYLIINYFKGGK |
| | LRFKKIKPEAFEANRFYTVINKKSGEIVPMEVNFNFDDPNLIILPLAFGKRQGR |
| | EFIWNDLLSLETGSLKLANGRVIEKTLYNRRTRQDEPALFVALTFERREVLDSS |
| | NIKPMNLIGVDRGENIPAVIALTDPEGCPLSRFKDSLGNPTHILRIGESYKEKQ |
| | RTIQAKKEVEQRRAGGYSRKYASKAKNLADDMVRNTARDLLYYAVTQDAMLIFE |
| | NLSRGFGRQGKRTFMAERQYTRMEDWLTAKLAYEGLSKTYLSKTLAQYTSKTCS |
| | NCGFTITSADYDRVLEKLKKTATGWMTTINGKELKVEGQITYYNRYKRQNVVKD |
| | LSVELDRLSEESVNNDISSWTKGRSGEALSLLKKRFSHRPVQEKFVCLNCGFET |
| | HADEQAALNIARSWLFLRSQEYKKYQTNKTTGNTDKRAFVETWQSFYRKKLKEV |
| | WKPAV (SEQ ID NO: 126) |
| 494: | QEIKRINKIRRRLVKDSNTKKAGKTGPMKTLLVRVMTPDLRERLENLRKKPENI |
| NTSB swap | PQPISNTSRANLNKLLTDYTEMKKAILHVYWEEFQKDPVGLMSRVAQPASKKID |
| from SEQ ID | QNKLKPEMDEKGNLTTAGFACSQCGQPLFVYKLEQVSEKGKAYTNYFGRCNVAE |
| NO: 1 | HEKLILLAQLKPEKDSDEAVTYSLGKFGQRALDFYSIHVTRESNHPVKPLEQIG |
| | GNSCASGPVGKALSDACMGAVASFLTKYQDIILEHQKVIKKNEKRLANLKDIAS |
| | ANGLAFPKITLPPQPHTKEGIEAYNNVVAQIVIWVNLNLWQKLKIGRDEAKPLQ |
| | RLKGFPSFPLVERQANEVDWWDMVCNVKKLINEKKEDGKVFWQNLAGYKRQEAL |
| | RPYLSSEEDRKKGKKFARYQLGDLLLHLEKKHGEDWGKVYDEAWERIDKKVEGL |
| | SKHIKLEEERRSEDAQSKAALTDWLRAKASFVIEGLKEADKDEFCRCELKLQKW |
| | YGDLRGKPFAIEAENSILDISGFSKQYNCAFIWQKDGVKKLNLYLIINYFKGGK |
| | LRFKKIKPEAFEANRFYTVINKKSGEIVPMEVNFNFDDPNLIILPLAFGKRQGR |
| | EFIWNDLLSLETGSLKLANGRVIEKTLYNRRTRQDEPALFVALTFERREVLDSS |
| | NIKPMNLIGVDRGENIPAVIALTDPEGCPLSRFKDSLGNPTHILRIGESYKEKQ |
| | RTIQAKKEVEQRRAGGYSRKYASKAKNLADDMVRNTARDLLYYAVTQDAMLIFE |
| | NLSRGFGRQGKRTFMAERQYTRMEDWLTAKLAYEGLSKTYLSKTLAQYTSKTCS |
| | NCGFTITSADYDRVLEKLKKTATGWMTTINGKELKVEGQITYYNRYKRQNVVKD |
| | LSVELDRLSEESVNNDISSWTKGRSGEALSLLKKRFSHRPVQEKFVCLNCGFET |
| | HADEQAALNIARSWLFLRSQEYKKYQTNKTTGNTDKRAFVETWQSFYRKKLKEV |
| | WKPAV (SEQ ID NO: 127) |
| 328: S867G | MQEIKRINKIRRRLVKDSNIKKAGKTGPMKTLLVRVMTPDLRERLENLRKKPEN |
| | IPQPISNTSRANLNKLLTDYTEMKKAILHVYWEEFQKDPVGLMSRVAQPAPKNI |
| | DQRKLIPVKDGNERLTSSGFACSQCCQPLYVYKLEQVNDKGKPHTNYFGRCNVS |
| | EHERLILLSPHKPEANDELVTYSLGKFGQRALDFYSIHVTRESNHPVKPLEQIG |
| | GNSCASGPVGKALSDACMGAVASFLTKYQDIILEHQKVIKKNEKRLANLKDIAS |
| | ANGLAFPKITLPPQPHTKEGIEAYNNVVAQIVIWVNLNLWQKLKIGRDEAKPLQ |
| | RLKGFPSFPLVERQANEVDWWDMVCNVKKLINEKKEDGKVFWQNLAGYKRQEAL |
| | LPYLSSEEDRKKGKKFARYQFGDLLLHLEKKHGEDWGKVYDEAWERIDKKVEGL |
| | SKHIKLEEERRSEDAQSKAALTDWLRAKASFVIEGLKEADKDEFCRCELKLQKW |
| | YGDLRGKPFAIEAENSILDISGFSKQYNCAFIWQKDGVKKLNLYLIINYFKGGK |
| | LRFKKIKPEAFEANRFYTVINKKSGEIVPMEVNFNFDDPNLIILPLAFGKRQGR |
| | EFIWNDLLSLETGSLKLANGRVIEKTLYNRRTRQDEPALFVALTFERREVLDSS |
| | NIKPMNLIGIDRGENIPAVIALTDPEGCPLSRFKDSLGNPTHILRIGESYKEKQ |
| | RTIQAAKEVEQRRAGGYSRKYASKAKNLADDMVRNTARDLLYYAVTQDAMLIFE |
| | NLSRGFGRQGKRTFMAERQYTRMEDWLTAKLAYEGLPSKTYLSKTLAQYTSKTC |
| | SNCGFTITSADYDRVLEKLKKTATGWMTTINGKELKVEGQITYYNRYKRQNVVK |
| | DLGVELDRLSEESVNNDISSWTKGRSGEALSLLKKRFSHRPVQEKFVCLNCGFE |
| | THADEQAALNIARSWLFLRSQEYKKYQTNKTTGNTDKRAFVETWQSFYRKKLKE |
| | VWKPAV (SEQ ID NO: 128) |
| 388: | MQEIKRINKIRRRLVKDSNIKKAGKTGPMKTLLVRVMTPDLRERLENLRKKPEN |
| L379R + A708K + | IPQPISNTSRANLNKLLTDYTEMKKAILHVYWEEFQKDPVGLMSRVAQPAPKNI |
| [P793] + | DQRKLIPVKDGNERLTSSGFACSQCCQPLYVYKLEQVNDKGKPHTNYFGRCNVS |
| X1 | EHERLILLSPHKPEANDELVTYSLGKFGQRALDFYSIHVTRESNHPVKPLEQIG |
| Helical2 | GNSCASGPVGKALSDACMGAVASFLTKYQDIILEHQKVIKKNEKRLANLKDIAS |
| swap | ANGLAFPKITLPPQPHTKEGIEAYNNVVAQIVIWVNLNLWQKLKIGRDEAKPLQ |
| | RLKGFPSFPVVERRENEVDWWNTINEVKKLIDAKRDMGRVFWSGVTAEKRNTIL |
| | EGYNYLPNENDHKKREGSLENPKKPAKRQFGDLLLYLEKKYAGDWGKVFDEAWE |
| | RIDKKIAGLTSHIEREEARNAEDAQSKAVLTDWLRAKASFVLERLKEMDEKEFY |
| | ACEIQLQKWYGDLRGNPFAVEAENSILDISGFSKQYNCAFIWQKDGVKKLNLYL |
| | IINYFKGGKLRFKKIKPEAFEANRFYTVINKKSGEIVPMEVNFNFDDPNLIILP |
| | LAFGKRQGREFIWNDLLSLETGSLKLANGRVIEKTLYNRRTRQDEPALFVALTF |
| | ERREVLDSSNIKPMNLIGIDRGENIPAVIALTDPEGCPLSRFKDSLGNPTHILR |
| | IGESYKEKQRTIQAKKEVEQRRAGGYSRKYASKAKNLADDMVRNTARDLLYYAV |
| | TQDAMLIFENLSRGFGRQGKRTFMAERQYTRMEDWLTAKLAYEGLSKTYLSKTL |
| | AQYTSKTCSNCGFTITSADYDRVLEKLKKTATGWMTTINGKELKVEGQITYYNR |
| | YKRQNVVKDLSVELDRLSEESVNNDISSWTKGRSGEALSLLKKRFSHRPVQEKF |
| | VCLNCGFETHADEQAALNIARSWLFLRSQEYKKYQTNKTTGNTDKRAFVETWQS |
| | FYRKKLKEVWKPAV (SEQ ID NO: 129) |
| 389: | MQEIKRINKIRRRLVKDSNIKKAGKTGPMKTLLVRVMTPDLRERLENLRKKPEN |
| L379R + A708K + | IPQPISNTSRANLNKLLTDYTEMKKAILHVYWEEFQKDPVGLMSRVAQPAPKNI |
| [P793] + | DQRKLIPVKDGNERLTSSGFACSQCCQPLYVYKLEQVNDKGKPHTNYFGRCNVS |
| X1 RuvC1 | EHERLILLSPHKPEANDELVTYSLGKFGQRALDFYSIHVTRESNHPVKPLEQIG |
| swap | GNSCASGPVGKALSDACMGAVASFLTKYQDIILEHQKVIKKNEKRLANLKDIAS |
| | ANGLAFPKITLPPQPHTKEGIEAYNNVVAQIVIWVNLNLWQKLKIGRDEAKPLQ |
| | RLKGFPSFPLVERQANEVDWWDMVCNVKKLINEKKEDGKVFWQNLAGYKRQEAL |
| | RPYLSSEEDRKKGKKFARYQFGDLLLHLEKKHGEDWGKVYDEAWERIDKKVEGL |
| | SKHIKLEEERRSEDAQSKAALTDWLRAKASFVIEGLKEADKDEFCRCELKLQKW |
| | YGDLRGKPFAIEAENSILDISGFSKQYNCAFIWQKDGVKKLNLYLIINYFKGGK |
| | LRFKKIKPEAFEANRFYTVINKKSGEIVPMEVNFNFDDPNLIILPLAFGKRQGR |
| | EFIWNDLLSLETGSLKLANGRVIEKTLYNRRTRQDEPALFVALTFERREVLDSS |
| | NIKPVNLIGVDRGENIPAVIALTDPEGCPLPEFKDSSGGPTDILRIGEGYKEKQ |
| | RAIQAAKEVEQRRAGGYSRKFASKSRNLADDMVRNSARDLFYHAVTHDAVLVFE |
| | NLSRGFGRQGKRTFMTERQYTKMEDWLTAKLAYEGLTSKTYLSKTLAQYTSKTC |
| | SNCGFTITSADYDRVLEKLKKTATGWMTTINGKELKVEGQITYYNRYKRQNVVK |
| | DLSVELDRLSEESVNNDISSWTKGRSGEALSLLKKRFSHRPVQEKFVCLNCGFE |
| | THADEQAALNIARSWLFLRSQEYKKYQTNKTTGNTDKRAFVETWQSFYRKKLKE |
| | VWKPAV (SEQ ID NO: 130) |
| 390: | MQEIKRINKIRRRLVKDSNIKKAGKTGPMKTLLVRVMTPDLRERLENLRKKPEN |
| L379R + A708K + | IPQPISNTSRANLNKLLTDYTEMKKAILHVYWEEFQKDPVGLMSRVAQPAPKNI |
| [P793] + | DQRKLIPVKDGNERLTSSGFACSQCCQPLYVYKLEQVNDKGKPHTNYFGRCNVS |
| X1 RuvC2 | EHERLILLSPHKPEANDELVTYSLGKFGQRALDFYSIHVTRESNHPVKPLEQIG |
| swap | GNSCASGPVGKALSDACMGAVASFLTKYQDIILEHQKVIKKNEKRLANLKDIAS |
| | ANGLAFPKITLPPQPHTKEGIEAYNNVVAQIVIWVNLNLWQKLKIGRDEAKPLQ |
| | RLKGFPSFPLVERQANEVDWWDMVCNVKKLINEKKEDGKVFWQNLAGYKRQEAL |
| | RPYLSSEEDRKKGKKFARYQFGDLLLHLEKKHGEDWGKVYDEAWERIDKKVEGL |
| | SKHIKLEEERRSEDAQSKAALTDWLRAKASFVIEGLKEADKDEFCRCELKLQKW |
| | YGDLRGKPFAIEAENSILDISGFSKQYNCAFIWQKDGVKKLNLYLIINYFKGGK |
| | LRFKKIKPEAFEANRFYTVINKKSGEIVPMEVNFNFDDPNLIILPLAFGKRQGR |
| | EFIWNDLLSLETGSLKLANGRVIEKTLYNRRTRQDEPALFVALTFERREVLDSS |
| | NIKPMNLIGIDRGENIPAVIALTDPEGCPLSRFKDSLGNPTHILRIGESYKEKQ |
| | RTIQAKKEVEQRRAGGYSRKYASKAKNLADDMVRNTARDLLYYAVTQDAMLIFE |
| | NLSRGFGRQGKRTFMAERQYTRMEDWLTAKLAYEGLSKTYLSKTLAQYTSKTCS |
| | NCGFTITSADYDRVLEKLKKTATGWMTTINGKELKVEGQITYYNRYKRQNVVKD |
| | LSVELDRLSEESVNNDISSWTKGRSGEALSLLKKRFSHRPVQEKFVCLNCGFET |
| | HADEQAALNIARSWLFLNSNSTEFKSYKSGKQPFVGAWQAFYKRRLKEVWKPNA |
| | (SEQ ID NO: 131) |

[0267] In some embodiments, the CasX variant protein comprises a sequence selected from the group consisting of SEQ ID NOs: 36-131, 208, 210, 212, 214, 216-229, 240, 242, 244, 246, 248, 250, 252, 254, 256 and 258, or a sequence having at least about 50%, at least about 60%, at least about 70%, at least about 80%, at least about 90%, or at least about 95%, or at least about 95%, or at least about 96%, or at least about 97%, or at least about 98%, or at least about 99% sequence identity thereto. In some embodiments, the CasX variant protein comprises a sequence selected from the group consisting of SEQ ID NOs: 36-131, 208, 210, 212, 214, 216-229, 240, 242, 244, 246, 248, 250, 252, 254, 256 and 258. In some embodiments, the CasX variant protein comprises a sequence selected from the group consisting of SEQ ID NOs: 36-131, or a sequence having at least about 50%, at least about 60%, at least about 70%, at least about 80%, at least about 90%, or at least about 95%, or at least about 95%, or at least about 96%, or at least about 97%, or at least about 98%, or at least about 99% sequence identity thereto. In some embodiments, the CasX variant protein comprises a sequence selected from the group consisting of SEQ ID NOs: 36-131.

[0268] In some embodiments, the CasX variant protein has one or more improved characteristic of the CasX protein when compared to a reference CasX protein, for example a reference protein of SEQ ID NO: 1, SEQ ID NO: 2 or SEQ ID NO: 3. In some embodiments, the at least one improved characteristic of the CasX variant is at least about 1.1 to about 100,000-fold improved relative to the reference protein. In some embodiments, the at least one improved characteristic of the CasX variant is at least about 1.1 to about 10,000-fold improved, at least about 1.1 to about 1,000-fold improved, at least about 1.1 to about 500-fold improved, at least about 1.1 to about 400-fold improved, at least about 1.1 to about 300-fold improved, at least about 1.1 to about 200-fold improved, at least about 1.1 to about 100-fold improved, at least about 1.1 to about 50-fold improved, at least about 1.1 to about 40-fold improved, at least about 1.1 to about 30-fold improved, at least about 1.1 to about 20-fold improved, at least about 1.1 to about 10-fold improved, at least about 1.1 to about 9-fold improved, at least about 1.1 to about 8-fold improved, at least about 1.1 to about 7-fold improved, at least about 1.1 to about 6-fold improved, at least about 1.1 to about 5-fold improved, at least about 1.1 to about 4-fold improved, at least about 1.1 to about 3-fold improved, at least about 1.1 to about 2-fold improved, at least about 1.1 to about 1.5-fold improved, at least about 1.5 to about 3-fold improved, at least about 1.5 to about 4-fold improved, at least about 1.5 to about 5-fold improved, at least about 1.5 to about 10-fold improved, at least about 5 to about 10-fold improved, at least about 10 to about 20-fold improved, at least 10 to about 30-fold improved, at least 10 to about 50-fold improved or at least 10 to about 100-fold improved than the reference CasX protein. In some embodiments, the at least one improved characteristic of the CasX variant is at least about 10 to about 1000-fold improved relative to the reference CasX protein.

[0269] In some embodiments, the one or more improved characteristics of the CasX variant protein is at least about 5, at least about 10, at least about 20, at least about 30, at least about 40, at least about 50, at least about 60, at least about 70, at least about 80, at least about 90, at least about 100, at least about 250, at least about 500, or at least about 1000, at least about 5,000, at least about 10,000, or at least about 100,000-fold improved relative to a reference CasX protein. In some embodiments, an improved characteristics of the CasX variant protein is at least about 1.1, at least about 1.2, at least about 1.3, at least about 1.4, at least about 1.5, at least about 1.6, at least about 1.7, at least about 1.8, at least about 1.9, at least about 2, at least about 2.1, at least about 2.2, at least about 2.3, at least about 2.4, at least about 2.5, at least about 2.6, at least about 2.7, at least about 2.8, at least about 2.9, at least about 3, at least about 3.5, at least about 4, at least about 4.5, at least about 5, at least about 5.5, at least about 6, at least about 6.5, at least about 7.0, at least about 7.5, at least about 8, at least about 8.5, at least about 9, at least about 9.5, at least about 10, at least about 11, at least about 12, at least about 13, at least about 14, at least about 15, at least about 20, at least about 30, at least about 40, at least about 50, at least about 60, at least about 70, at least about 80, at least about 90 at least about 100, at least about 500, at least about 1,000, at least about 10,000, or at least about 100,000-fold improved relative to a reference CasX protein. In other cases, the one or more improved characteristics of the CasX variant is about 1.1 to 100,00-fold, about 1.1 to 10,00-fold, about 1.1 to 1,000-fold, about 1.1 to 500-fold, about 1.1 to 100-fold, about 1.1 to 50-fold, about 1.1 to 20-fold, about 10 to 100,00-fold, about 10 to 10,00-fold, about 10 to 1,000-fold, about 10 to 500-fold, about 10 to 100-fold, about 10 to 50-fold, about 10 to 20-fold, about 2 to 70-fold, about 2 to 50-fold, about 2 to 30-fold, about 2 to 20-fold, about 2 to 10-fold, about 5 to 50-fold, about 5 to 30-fold, about 5 to 10-fold, about 100 to 100,00-fold, about 100 to 10,00-fold, about 100 to 1,000-fold, about 100 to 500-fold, about 500 to 100,00-fold, about 500 to 10,00-fold, about 500 to 1,000-fold, about 500 to 750-fold, about 1,000 to 100,00-fold, about 10,000 to 100,00-fold, about 20 to 500-fold, about 20 to 250-fold, about 20 to 200-fold, about 20 to 100-fold, about 20 to 50-fold, about 50 to 10,000-fold, about 50 to 1,000-fold, about 50 to 500-fold, about 50 to 200-fold, or about 50 to 100-fold, improved relative to the reference CasX of SEQ ID NO: 1, SEQ ID NO: 2 or SEQ ID NO: 3. In other cases, the one or more improved characteristics of the CasX variant is about 1.1-fold, 1.2-fold, 1.3-fold, 1.4-fold, 1.5-fold, 1.6-fold, 1.7-fold, 1.8-fold, 1.9-fold, 2-fold, 3-fold, 4-fold, 5-fold, 6-fold, 7-fold, 8-fold, 9-fold, 10-fold, 11-fold, 12-fold, 13-fold, 14-fold, 15-fold, 16-fold, 17-fold, 18-fold, 19-fold, 20-fold, 25-fold, 30-fold, 40-fold, 45-fold, 50-fold, 55-fold, 60-fold, 70-fold, 80-fold, 90-fold, 100-fold, 110-fold, 120-fold, 130-fold, 140-fold, 150-fold, 160-fold, 170-fold, 180-fold, 190-fold, 200-fold, 210-fold, 220-fold, 230-fold, 240-fold, 250-fold, 260-fold, 270-fold, 280-fold, 290-fold, 300-fold, 310-fold, 320-fold, 330-fold, 340-fold, 350-fold, 360-fold, 370-fold, 380-fold, 390-fold, 400-fold, 425-fold, 450-fold, 475-fold, or 500-fold or more improved relative to the reference CasX of SEQ ID NO: 1, SEQ ID NO: 2 or SEQ ID NO: 3. Exemplary characteristics that can be improved in CasX variant proteins relative to the same characteristics in reference CasX proteins include, but are not limited to, improved folding of the variant, improved binding affinity to the gNA, improved binding affinity to the target DNA, improved ability to utilize a greater spectrum of PAM sequences in the editing and/or binding of target DNA, improved unwinding of the target DNA, increased editing activity, improved editing efficiency, improved editing specificity, increased activity of the nuclease, increased target strand loading for double strand cleavage, decreased target strand loading for single strand nicking, decreased off-target cleavage, improved binding of the non-target strand of DNA, improved protein stability, improved CasX:gNA RNA complex stability, improved protein solubility, improved CasX:gNA RNP complex solubility, improved protein yield, improved protein expression, and improved fusion characteristics. In some embodiments, the variant comprises at least one improved characteristic. In other embodiments, the variant comprises at least two improved characteristics. In further embodiments, the variant comprises at least three improved characteristics. In some embodiments, the variant comprises at least four improved characteristics. In still further embodiments, the variant comprises at least five, at least six, at least seven, at least eight, at least nine, at least ten, at least eleven, at least twelve, at least thirteen, or more improved characteristics.

[0270] Exemplary improved characteristic include, as one example, improved editing efficiency. In some embodiments, an RNP comprising the CasX protein and a gNA of the disclosure, at a concentration of 20 pM or less, is capable of cleaving a double stranded DNA target with an efficiency of at least 80%. In some embodiments, the RNP at a concentration of 20 pM or less, is capable of cleaving a double stranded DNA target with an efficiency of at least 40%, at least 50%, at least 60%, at least 70%, at least 80%, at least 85%, at least 90% or at least 95%. In some embodiments, the RNP at a concentration of 50 pM or less, 40 pM or less, 30 pM or less, 20 pM or less, 10 pM or less, or 5 pM or less, is capable of cleaving a double stranded DNA target with an efficiency of at least 40%, at least 50%, at least 60%, at least 70%, at least 80%, at least 85%, at least 90% or at least 95%.

[0271] Further improved characteristics are described in more detail below.

[0272] j. Protein Stability

[0273] In some embodiments, the disclosure provides a CasX variant protein with improved stability relative to a reference CasX protein. In some embodiments, improved stability of the CasX variant protein results in expression of a higher steady state of protein, which improves editing efficiency. In some embodiments, improved stability of the CasX variant protein results in a larger fraction of CasX protein that remains folded in a functional conformation and improves editing efficiency or improves purifiability for manufacturing purposes. As used herein, a “functional conformation” refers to a CasX protein that is in a conformation where the protein is capable of binding a gNA and target DNA. In embodiments wherein the CasX variant does not carry one or more mutations rendering it catalytically dead, the CasX variant is capable of cleaving, nicking, or otherwise modifying the target DNA. For example, a functional CasX variant can, in some embodiments, be used for gene-editing, and a functional conformation refers to an “editing-competent” conformation. In some exemplary embodiments, including those embodiments where the CasX variant protein results in a larger fraction of CasX protein that remains folded in a functional conformation, a lower concentration of CasX variant is needed for applications such as gene editing compared to a reference CasX protein. Thus, in some embodiments, the CasX variant with improved stability has improved efficiency compared to a reference CasX in one or more gene editing contexts.

[0274] In some embodiments, the disclosure provides a CasX variant protein having improved thermostability relative to a reference CasX protein. In some embodiments, the CasX variant protein has improved thermostability of the CasX variant protein at a particular temperature range. Without wishing to be bound by any theory, some reference CasX proteins natively function in organisms with niches in groundwater and sediment; thus, some reference CasX proteins may have evolved to exhibit optimal function at lower or higher temperatures that may be desirable for certain applications. For example, one application of CasX variant proteins is gene editing of mammalian cells, which is typically carried out at about 37° C. In some embodiments, a CasX variant protein as described herein has improved thermostability compared to a reference CasX protein at a temperature of at least 16° C., at least 18° C., at least 20° C., at least 22° C., at least 24° C., at least 26° C., at least 28° C., at least 30° C., at least 32° C., at least 34° C., at least 35° C., at least 36° C., at least 37° C., at least 38° C., at least 39° C., at least 40° C., at least 41° C., at least 42° C., at least 44° C., at least 46° C., at least 48° C., at least 50° C., at least 52° C., or greater. In some embodiments, a CasX variant protein has improved thermostability and functionality compared to a reference CasX protein that results in improved gene editing functionality, such as mammalian gene editing applications, which may include human gene editing applications.

[0275] In some embodiments, the disclosure provides a CasX variant protein having improved stability of the CasX variant protein:gNA complex relative to the reference CasX protein:gNA complex such that the RNP remains in a functional form. Stability improvements can include increased thermostability, resistance to proteolytic degradation, enhanced pharmacokinetic properties, stability across a range of pH conditions, salt conditions, and tonicity. Improved stability of the complex may, in some embodiments, lead to improved editing efficiency.

[0276] In some embodiments, the disclosure provides a CasX variant protein having improved thermostability of the CasX variant protein:gNA complex relative to the reference CasX protein:gNA complex. In some embodiments, a CasX variant protein has improved thermostability relative to a reference CasX protein. In some embodiments, the CasX variant protein:gNA complex has improved thermostability relative to a complex comprising a reference CasX protein at temperatures of at least 16° C., at least 18° C., at least 20° C., at least 22° C., at least 24° C., at least 26° C., at least 28° C., at least 30° C., at least 32° C., at least 34° C., at least 35° C., at least 36° C., at least 37° C., at least 38° C., at least 39° C., at least 40° C., at least 41° C., at least 42° C., at least 44° C., at least 46° C., at least 48° C., at least 50° C., at least 52° C., or greater. In some embodiments, a CasX variant protein has improved thermostability of the CasX variant protein:gNA complex compared to a reference CasX protein:gNA complex, which results in improved function for gene editing applications, such as mammalian gene editing applications, which may include human gene editing applications.

[0277] In some embodiments, the improved stability and/or thermostability of the CasX variant protein comprises faster folding kinetics of the CasX variant protein relative to a reference CasX protein, slower unfolding kinetics of the CasX variant protein relative to a reference CasX protein, a larger free energy release upon folding of the CasX variant protein relative to a reference CasX protein, a higher temperature at which 50% of the CasX variant protein is unfolded (Tm) relative to a reference CasX protein, or any combination thereof. These characteristics may be improved by a wide range of values; for example, at least 1.1, at least 1.5, at least 10, at least 50, at least 100, at least 500, at least 1,000, at least 5,000, or at least a 10,000-fold improved, as compared to a reference CasX protein. In some embodiments, improved thermostability of the CasX variant protein comprises a higher Tm of the CasX variant protein relative to a reference CasX protein. In some embodiments, the Tm of the CasX variant protein is between about 20° C. to about 30° C., between about 30° C. to about 40° C., between about 40° C. to about 50° C., between about 50° C. to about 60° C., between about 60° C. to about 70° C., between about 70° C. to about 80° C., between about 80° C. to about 90° C. or between about 90° C. to about 100° C. Thermal stability is determined by measuring the “melting temperature” (Tm), which is defined as the temperature at which half of the molecules are denatured. Methods of measuring characteristics of protein stability such as Tm and the free energy of unfolding are known to persons of ordinary skill in the art, and can be measured using standard biochemical techniques in vitro. For example, Tm may be measured using Differential Scanning Calorimetry, a thermo-analytical technique in which the difference in the amount of heat required to increase the temperature of a sample and a reference is measured as a function of temperature (Chen et al (2003) Pharm Res 20:1952-60; Ghirlando et al (1999) Immunol Lett 68:47-52). Alternatively, or in addition, CasX variant protein Tm may be measured using commercially available methods such as the ThermoFisher Protein Thermal Shift system. Alternatively, or in addition, circular dichroism may be used to measure the kinetics of folding and unfolding, as well as the Tm (Murray et al. (2002) J. Chromatogr Sci 40:343-9). Circular dichroism (CD) relies on the unequal absorption of left-handed and right-handed circularly polarized light by asymmetric molecules such as proteins. Certain structures of proteins, for example alpha-helices and beta-sheets, have characteristic CD spectra. Accordingly, in some embodiments, CD may be used to determine the secondary structure of a CasX variant protein.

[0278] In some embodiments, improved stability and/or thermostability of the CasX variant protein comprises improved folding kinetics of the CasX variant protein relative to a reference CasX protein. In some embodiments, folding kinetics of the CasX variant protein are improved relative to a reference CasX protein by at least about 5, at least about 10, at least about 50, at least about 100, at least about 500, at least about 1,000, at least about 2,000, at least about 3,000, at least about 4,000, at least about 5,000, or at least about a 10,000-fold improvement. In some embodiments, folding kinetics of the CasX variant protein are improved relative to a reference CasX protein by at least about 1 kJ/mol, at least about 5 kJ/mol, at least about 10 kJ/mol, at least about 20 kJ/mol, at least about 30 kJ/mol, at least about 40 kJ/mol, at least about 50 kJ/mol, at least about 60 kJ/mol, at least about 70 kJ/mol, at least about 80 kJ/mol, at least about 90 kJ/mol, at least about 100 kJ/mol, at least about 150 kJ/mol, at least about 200 kJ/mol, at least about 250 kJ/mol, at least about 300 kJ/mol, at least about 350 kJ/mol, at least about 400 kJ/mol, at least about 450 kJ/mol, or at least about 500 kJ/mol.

[0279] Exemplary amino acid changes that can increase the stability of a CasX variant protein relative to a reference CasX protein may include, but are not limited to, amino acid changes that increase the number of hydrogen bonds within the CasX variant protein, increase the number of disulfide bridges within the CasX variant protein, increase the number of salt bridges within the CasX variant protein, strengthen interactions between parts of the CasX variant protein, increase the buried hydrophobic surface area of the CasX variant protein, or any combinations thereof.

[0280] k. Protein Yield

[0281] In some embodiments, the disclosure provides a CasX variant protein having improved yield during expression and purification relative to a reference CasX protein. In some embodiments, the yield of CasX variant proteins purified from bacterial or eukaryotic host cells is improved relative to a reference CasX protein. In some embodiments, the bacterial host cells are Escherichia coli cells. In some embodiments, the eukaryotic cells are yeast, plant (e.g. tobacco), insect (e.g. Spodoptera frugiperda sf9 cells), mouse, rat, hamster, guinea pig, monkey, or human cells. In some embodiments, the eukaryotic host cells are mammalian cells, including, but not limited to HEK293 cells, BHK cells, NS0 cells, SP2/0 cells, YO myeloma cells, P3X63 mouse myeloma cells, PER cells, PER.C6 cells, hybridoma cells, NIH3T3 cells, COS, HeLa, or CHO cells.

[0282] In some embodiments, improved yield of the CasX variant protein is achieved through codon optimization. Cells use 64 different codons, 61 of which encode the 20 standard amino acids, while another 3 function as stop codons. In some cases, a single amino acid is encoded by more than one codon. Different organisms exhibit bias towards use of different codons for the same naturally occurring amino acid. Therefore, the choice of codons in a protein, and matching codon choice to the organism in which the protein will be expressed, can, in some cases, significantly affect protein translation and therefore protein expression levels. In some embodiments, the CasX variant protein is encoded by a nucleic acid that has been codon optimized. In some embodiments, the nucleic acid encoding the CasX variant protein has been codon optimized for expression in a bacterial cell, a yeast cell, an insect cell, a plant cell, or a mammalian cell. In some embodiments, the mammal cell is a mouse, a rat, a hamster, a guinea pig, a monkey, or a human. In some embodiments, the CasX variant protein is encoded by a nucleic acid that has been codon optimized for expression in a human cell. In some embodiments, the CasX variant protein is encoded by a nucleic acid from which nucleotide sequences that reduce translation rates in prokaryotes and eukaryotes have been removed. For example, runs of greater than three thymine residues in a row can reduce translation rates in certain organisms or internal polyadenylation signals can reduce translation.

[0283] In some embodiments, improvements in solubility and stability, as described herein, result in improved yield of the CasX variant protein relative to a reference CasX protein.

[0284] Improved protein yield during expression and purification can be evaluated by methods known in the art. For example, the amount of CasX variant protein can be determined by running the protein on an SDS-page gel, and comparing the CasX variant protein to a either a control whose amount or concentration is known in advance to determine an absolute level of protein. Alternatively, or in addition, a purified CasX variant protein can be run on an SDS-page gel next to a reference CasX protein undergoing the same purification process to determine relative improvements in CasX variant protein yield. Alternatively, or in addition, levels of protein can be measured using immunohistochemical methods such as Western blot or ELISA with an antibody to CasX, or by HPLC. For proteins in solution, concentration can be determined by measuring of the protein's intrinsic UV absorbance, or by methods which use protein-dependent color changes such as the Lowry assay, the Smith copper/bicinchoninic assay or the Bradford dye assay. Such methods can be used to calculate the total protein (such as, for example, total soluble protein) yield obtained by expression under certain conditions. This can be compared, for example, to the protein yield of a reference CasX protein under similar expression conditions.

[0285] l. Protein Solubility

[0286] In some embodiments, a CasX variant protein has improved solubility relative to a reference CasX protein. In some embodiments, a CasX variant protein has improved solubility of the CasX:gNA ribonucleoprotein complex variant relative to a ribonucleoprotein complex comprising a reference CasX protein.

[0287] In some embodiments, an improvement in protein solubility leads to higher yield of protein from protein purification techniques such as purification from E. coli. Improved solubility of CasX variant proteins may, in some embodiments, enable more efficient activity in cells, as a more soluble protein may be less likely to aggregate in cells. Protein aggregates can in certain embodiments be toxic or burdensome on cells, and, without wishing to be bound by any theory, increased solubility of a CasX variant protein may ameliorate this result of protein aggregation. Further, improved solubility of CasX variant proteins may allow for enhanced formulations permitting the delivery of a higher effective dose of functional protein, for example in a desired gene editing application. In some embodiments, improved solubility of a CasX variant protein relative to a reference CasX protein results in improved yield of the CasX variant protein during purification of at least about 5, at least about 10, at least about 20, at least about 30, at least about 40, at least about 50, at least about 60, at least about 70, at least about 80, at least about 90, at least about 100, at least about 250, at least about 500, or at least about 1000-fold greater yield. In some embodiments, improved solubility of a CasX variant protein relative to a reference CasX protein improves activity of the CasX variant protein in cells by at least about 1.1, at least about 1.2, at least about 1.3, at least about 1.4, at least about 1.5, at least about 1.6, at least about 1.7, at least about 1.8, at least about 1.9, at least about 2, at least about 2.1, at least about 2.2, at least about 2.3, at least about 2.4, at least about 2.5, at least about 2.6, at least about 2.7, at least about 2.8, at least about 2.9, at least about 3, at least about 3.5, at least about 4, at least about 4.5, at least about 5, at least about 5.5, at least about 6, at least about 6.5, at least about 7.0, at least about 7.5, at least about 8, at least about 8.5, at least about 9, at least about 9.5, at least about 10, at least about 11, at least about 12, at least about 13, at least about 14, or at least about 15-fold greater activity.

[0288] Methods of measuring CasX protein solubility, and improvements thereof in CasX variant proteins, will be readily apparent to the person of ordinary skill in the art. For example, CasX variant protein solubility can in some embodiments be measured by taking densitometry readings on a gel of the soluble fraction of lysed E. coli. Alternatively, or addition, improvements in CasX variant protein solubility can be measured by measuring the maintenance of soluble protein product through the course of a full protein purification. For example, soluble protein product can be measured at one or more steps of gel affinity purification, tag cleavage, cation exchange purification, running the protein on a size exclusion chromatography (SEC) column. In some embodiments, the densitometry of every band of protein on a gel is read after each step in the purification process. CasX variant proteins with improved solubility may, in some embodiments, maintain a higher concentration at one or more steps in the protein purification process when compared to the reference CasX protein, while an insoluble protein variant may be lost at one or more steps due to buffer exchanges, filtration steps, interactions with a purification column, and the like.

[0289] In some embodiments, improving the solubility of CasX variant proteins results in a higher yield in terms of mg/L of protein during protein purification when compared to a reference CasX protein.

[0290] In some embodiments, improving the solubility of CasX variant proteins enables a greater amount of editing events compared to a less soluble protein when assessed in editing assays such as the EGFP disruption assays described herein.

[0291] m. Protein Affinity for the gNA

[0292] In some embodiments, a CasX variant protein has improved affinity for the gNA relative to a reference CasX protein, leading to the formation of the ribonucleoprotein complex. Increased affinity of the CasX variant protein for the gNA may, for example, result in a lower K_{d} for the generation of a RNP complex, which can, in some cases, result in a more stable ribonucleoprotein complex formation. In some embodiments, increased affinity of the CasX variant protein for the gNA results in increased stability of the ribonucleoprotein complex when delivered to human cells. This increased stability can affect the function and utility of the complex in the cells of a subject, as well as result in improved pharmacokinetic properties in blood, when delivered to a subject. In some embodiments, increased affinity of the CasX variant protein, and the resulting increased stability of the ribonucleoprotein complex, allows for a lower dose of the CasX variant protein to be delivered to the subject or cells while still having the desired activity, for example in vivo or in vitro gene editing.

[0293] In some embodiments, a higher affinity (tighter binding) of a CasX variant protein to a gNA allows for a greater amount of editing events when both the CasX variant protein and the gNA remain in an RNP complex. Increased editing events can be assessed using editing assays such as the EGFP disruption assay described herein.

[0294] In some embodiments, the K_{d} of a CasX variant protein for a gNA is increased relative to a reference CasX protein by a factor of at least about 1.1, at least about 1.2, at least about 1.3, at least about 1.4, at least about 1.5, at least about 1.6, at least about 1.7, at least about 1.8, at least about 1.9, at least about 2, at least about 3, at least about 4, at least about 5, at least about 6, at least about 7, at least about 8, at least about 9, at least about 10, at least about 15, at least about 20, at least about 25, at least about 30, at least about 35, at least about 40, at least about 45, at least about 50, at least about 60, at least about 70, at least about 80, at least about 90, or at least about 100. In some embodiments, the CasX variant has about 1.1 to about 10-fold increased binding affinity to the gNA compared to the reference CasX protein of SEQ ID NO: 2.

[0295] Without wishing to be bound by theory, in some embodiments amino acid changes in the Helical I domain can increase the binding affinity of the CasX variant protein with the gNA targeting sequence, while changes in the Helical II domain can increase the binding affinity of the CasX variant protein with the gNA scaffold stem loop, and changes in the oligonucleotide binding domain (OBD) increase the binding affinity of the CasX variant protein with the gRNA triplex.

[0296] Methods of measuring CasX protein binding affinity for a gNA include in vitro methods using purified CasX protein and gNA. The binding affinity for reference CasX and variant proteins can be measured by fluorescence polarization if the gNA or CasX protein is tagged with a fluorophore. Alternatively, or in addition, binding affinity can be measured by biolayer interferometry, electrophoretic mobility shift assays (EMSAs), or filter binding. Additional standard techniques to quantify absolute affinities of RNA binding proteins such as the reference CasX and variant proteins of the disclosure for specific gNAs such as reference gNAs and variants thereof include, but are not limited to, isothermal calorimetry (ITC), and surface plasmon resonance (SPR), as well as the methods of the Examples.

[0297] n. Affinity for Target Nucleic Acid

[0298] In some embodiments, a CasX variant protein has improved binding affinity for a target nucleic acid relative to the affinity of a reference CasX protein for a target nucleic acid. In some embodiments, the improved affinity for the target nucleic acid comprises improved affinity for the target nucleic acid sequence, improved affinity for the PAM sequence, an improved ability to search DNA for the target nucleic acid sequence, or any combinations thereof. Without wishing to be bound by theory, it is thought that CRISPR/Cas system proteins such as CasX may find their target nucleic acid sequences by one-dimension diffusion along a DNA molecule. The process is thought to include (1) binding of the ribonucleoprotein to the DNA molecule followed by (2) stalling at the target nucleic acid sequence, either of which may be, in some embodiments, affected by improved affinity of CasX proteins for a target nucleic acid sequence, thereby improving function of the CasX variant protein compared to a reference CasX protein.

[0299] In some embodiments, a CasX variant protein with improved target nucleic acid affinity has increased overall affinity for DNA. In some embodiments, a CasX variant protein with improved target nucleic acid affinity has increased affinity for specific PAM sequences other than the canonical TTC PAM recognized by the reference CasX protein of SEQ ID NO: 2, including binding affinity for PAM sequences selected from the group consisting of TTC, ATC, GTC, and CTC. Without wishing to be bound by theory, it is possible that these protein variants will interact more strongly with DNA overall and will have an increased ability to access and edit sequences within the target DNA due to the ability to bind additional PAM sequences beyond those of wild-type Cas X, thereby allowing for a more efficient search process of the CasX protein for the target sequence. A higher overall affinity for DNA also, in some embodiments, can increase the frequency at which a CasX protein can effectively start and finish a binding and unwinding step, thereby facilitating target strand invasion and R-loop formation, and ultimately the cleavage of a target nucleic acid sequence.

[0300] Without wishing to be bound by theory, it is possible that amino acid changes in the NTSBD that increase the efficiency of unwinding, or capture, of a non-target DNA strand in the unwound state, can increase the affinity of CasX variant proteins for target DNA. Alternatively, or in addition, amino acid changes in the NTSBD that increase the ability of the NTSBD to stabilize DNA during unwinding can increase the affinity of CasX variant proteins for target DNA. Alternatively, or in addition, amino acid changes in the OBD may increase the affinity of CasX variant protein binding to the protospacer adjacent motif (PAM), thereby increasing affinity of the CasX variant protein for target nucleic acid. Alternatively, or in addition, amino acid changes in the Helical I and/or II, RuvC and TSL domains that increase the affinity of the CasX variant protein for the target nucleic acid strand can increase the affinity of the CasX variant protein for target nucleic acid.

[0301] In some embodiments, the CasX variant protein has increased binding affinity to the target nucleic acid sequence compared to the reference protein of SEQ ID NO: 1, SEQ ID NO: 2, or SEQ ID NO: 3. In some embodiments, affinity of a CasX variant protein of the disclosure for a target nucleic acid molecule is increased relative to a reference CasX protein by a factor of at least about 1.1, at least about 1.2, at least about 1.3, at least about 1.4, at least about 1.5, at least about 1.6, at least about 1.7, at least about 1.8, at least about 1.9, at least about 2, at least about 3, at least about 4, at least about 5, at least about 6, at least about 7, at least about 8, at least about 9, at least about 10, at least about 15, at least about 20, at least about 25, at least about 30, at least about 35, at least about 40, at least about 45, at least about 50, at least about 60, at least about 70, at least about 80, at least about 90, or at least about 100.

[0302] In some embodiments, a CasX variant protein has improved binding affinity for the non-target strand of the target nucleic acid. As used herein, the term “non-target strand” refers to the strand of the DNA target nucleic acid sequence that does not form Watson and Crick base pairs with the targeting sequence in the gNA, and is complementary to the target strand.

[0303] Methods of measuring CasX protein (such as reference or variant) affinity for a target nucleic acid molecule may include electrophoretic mobility shift assays (EMSAs), filter binding, isothermal calorimetry (ITC), and surface plasmon resonance (SPR), fluorescence polarization and biolayer interferometry (BLI). Further methods of measuring CasX protein affinity for a target include in vitro biochemical assays that measure DNA cleavage events over time.

[0304] CasX variant proteins with higher affinity for their target nucleic acid may, in some embodiments, cleave the target nucleic acid sequence more rapidly than a reference CasX protein that does not have increased affinity for the target nucleic acid.

[0305] In some embodiments, the CasX variant protein is catalytically dead (dCasX). In some embodiments, the disclosure provides RNP comprising a catalytically-dead CasX protein that retains the ability to bind target DNA. An exemplary catalytically-dead CasX variant protein comprises one or more mutations in the active site of the RuvC domain of the CasX protein. In some embodiments, a catalytically-dead CasX variant protein comprises substitutions at residues 672, 769 and/or 935 of SEQ ID NO: 1. In some embodiments, a catalytically-dead CasX variant protein comprises substitutions of D672A, E769A and/or D935A in the reference CasX protein of SEQ ID NO: 1. In some embodiments, a catalytically-dead CasX protein comprises substitutions at amino acids 659, 765 and/or 922 of SEQ ID NO: 2. In some embodiments, a catalytically-dead CasX protein comprises D659A, E756A and/or D922A substitutions in a reference CasX protein of SEQ ID NO: 2. In further embodiments, a catalytically-dead CasX variant protein comprises deletions of all or part of the RuvC domain of the reference CasX protein.

[0306] In some embodiments, improved affinity for DNA of a CasX variant protein also improves the function of catalytically inactive versions of the CasX variant protein. In some embodiments, the catalytically inactive version of the CasX variant protein comprises one or mutations in the DED motif in the RuvC. Catalytically dead CasX variant proteins can, in some embodiments, be used for base editing or epigenetic modifications. With a higher affinity for DNA, in some embodiments, catalytically dead CasX variant proteins can, relative to catalytically active CasX, find their target DNA faster, remain bound to target DNA for longer periods of time, bind target DNA in a more stable fashion, or a combination thereof, thereby improving the function of the catalytically dead CasX variant protein.

[0307] o. Improved Specificity for a Target Site

[0308] In some embodiments, a CasX variant protein has improved specificity for a target nucleic acid sequence relative to a reference CasX protein. As used herein, “specificity,” sometimes referred to as “target specificity,” refers to the degree to which a CRISPR/Cas system ribonucleoprotein complex cleaves off-target sequences that are similar, but not identical to the target nucleic acid sequence; e.g., a CasX variant RNP with a higher degree of specificity would exhibit reduced off-target cleavage of sequences relative to a reference CasX protein. The specificity, and the reduction of potentially deleterious off-target effects, of CRISPR/Cas system proteins can be vitally important in order to achieve an acceptable therapeutic index for use in mammalian subjects.

[0309] In some embodiments, a CasX variant protein has improved specificity for a target site within the target nucleic acid sequence that is complementary to the targeting sequence of the gNA.

[0310] Without wishing to be bound by theory, it is possible that amino acid changes in the Helical I and II domains that increase the specificity of the CasX variant protein for the target nucleic acid strand can increase the specificity of the CasX variant protein for the target nucleic acid overall. In some embodiments, amino acid changes that increase specificity of CasX variant proteins for target nucleic acid may also result in decreased affinity of CasX variant proteins for DNA.

[0311] Methods of testing CasX protein (such as variant or reference) target specificity may include guide and Circularization for In vitro Reporting of Cleavage Effects by Sequencing (CIRCLE-seq), or similar methods. In brief, in CIRCLE-seq techniques, genomic DNA is sheared and circularized by ligation of stem-loop adapters, which are nicked in the stem-loop regions to expose 4 nucleotide palindromic overhangs. This is followed by intramolecular ligation and degradation of remaining linear DNA. Circular DNA molecules containing a CasX cleavage site are subsequently linearized with CasX, and adapter adapters are ligated to the exposed ends followed by high-throughput sequencing to generate paired end reads that contain information about the off-target site. Additional assays that can be used to detect off-target events, and therefore CasX protein specificity include assays used to detect and quantify indels (insertions and deletions) formed at those selected off-target sites such as mismatch-detection nuclease assays and next generation sequencing (NGS). Exemplary mismatch-detection assays include nuclease assays, in which genomic DNA from cells treated with CasX and sgRNA is PCR amplified, denatured and rehybridized to form hetero-duplex DNA, containing one wild type strand and one strand with an indel. Mismatches are recognized and cleaved by mismatch detection nucleases, such as Surveyor nuclease or T7 endonuclease I.

[0312] p. Unwinding of DNA

[0313] In some embodiments, a CasX variant protein has improved ability of unwinding DNA relative to a reference CasX protein. Poor dsDNA unwinding has been shown previously to impair or prevent the ability of CRISPR/Cas system proteins AnaCas9 or Cas14s to cleave DNA. Therefore, without wishing to be bound by any theory, it is likely that increased DNA cleavage activity by some CasX variant proteins of the disclosure is due, at least in part, to an increased ability to find and unwind the dsDNA at a target site.

[0314] Without wishing to be bound by theory, it is thought that amino acid changes in the NTSB domain may produce CasX variant proteins with increased DNA unwinding characteristics. Alternatively, or in addition, amino acid changes in the OBD or the helical domain regions that interact with the PAM may also produce CasX variant proteins with increased DNA unwinding characteristics.

[0315] Methods of measuring the ability of CasX proteins (such as variant or reference) to unwind DNA include, but are not limited to, in vitro assays that observe increased on rates of dsDNA targets in fluorescence polarization or biolayer interferometry.

[0316] q. Catalytic Activity

[0317] The ribonucleoprotein complex of the CasX:gNA systems disclosed herein comprise a reference CasX protein or variant thereof that bind to a target nucleic acid and cleaves the target nucleic acid. In some embodiments, a CasX variant protein has improved catalytic activity relative to a reference CasX protein. Without wishing to be bound by theory, it is thought that in some cases cleavage of the target strand can be a limiting factor for Cas12-like molecules in creating a dsDNA break. In some embodiments, CasX variant proteins improve bending of the target strand of DNA and cleavage of this strand, resulting in an improvement in the overall efficiency of dsDNA cleavage by the CasX ribonucleoprotein complex.

[0318] In some embodiments, a CasX variant protein has increased nuclease activity compared to a reference CasX protein. Variants with increased nuclease activity can be generated, for example, through amino acid changes in the RuvC nuclease domain. In some embodiments, the CasX variant comprises a nuclease domain having nickase activity. In the foregoing, the CasX nickase of a CasX:gNA system generates a single-stranded break within 10-18 nucleotides 3′ of a PAM site in the non-target strand. In other embodiments, the CasX variant comprises a nuclease domain having double-stranded cleavage activity. In the foregoing, the CasX of the CasX:gNA system generates a double-stranded break within 18-26 nucleotides 5′ of a PAM site on the target strand and 10-18 nucleotides 3′ on the non-target strand. Nuclease activity can be assayed by a variety of methods, including those of the Examples. In some embodiments, a CasX variant has a K_{cleave} constant that is at least 2-fold, or at least 3-fold, or at least 4-fold, or at least 5-fold, or at least 6-fold, or at least 7-fold, or at least 8-fold, or at least 9-fold, or at least 10-fold greater compared to a reference CasX.

[0319] In some embodiments, a CasX variant protein has the improved characteristic of forming RNP with gNA that result in a higher percentage of cleavage-competent RNP compared to an RNP of a reference CasX protein of SEQ ID NO: 1, SEQ ID NO: 2, or SEQ ID NO: 3 and the gNA, as described in the Examples. By cleavage competent, it is meant that the RNP that is formed has the ability to cleave the target nucleic acid. In some embodiments, the RNP of the CasX variant and the gNA exhibit at least a 2% to at least 30%, or at least a 5% to at least a 20%, or at least a 10% to at least a 15% higher percentage of cleavage-competent RNP compared to an RNP of the reference CasX of SEQ ID NO: 1, SEQ ID NO: 2, or SEQ ID NO: 3 and the gNA of Table 2A.

[0320] In some embodiments, a CasX variant protein has increased target strand loading for double strand cleavage compared to a reference CasX. Variants with increased target strand loading activity can be generated, for example, through amino acid changes in the TLS domain.

[0321] Without wishing to be bound by theory, amino acid changes in the TSL domain may result in CasX variant proteins with improved catalytic activity. Alternatively, or in addition, amino acid changes around the binding channel for the RNA:DNA duplex may also improve catalytic activity of the CasX variant protein.

[0322] In some embodiments, a CasX variant protein has increased collateral cleavage activity compared to a reference CasX protein. As used herein, “collateral cleavage activity” refers to additional, non-targeted cleavage of nucleic acids following recognition and cleavage of a target nucleic acid. In some embodiments, a CasX variant protein has decreased collateral cleavage activity compared to a reference CasX protein.

[0323] In some embodiments, for example those embodiments encompassing applications where cleavage of the target nucleic acid is not a desired outcome, improving the catalytic activity of a CasX variant protein comprises altering, reducing, or abolishing the catalytic activity of the CasX variant protein. In some embodiments, a ribonucleoprotein complex comprising a dCasX variant protein binds to a target nucleic acid and does not cleave the target nucleic acid.

[0324] In some embodiments, the CasX ribonucleoprotein complex comprising a CasX variant protein binds a target DNA but generates a single stranded nick in the target DNA. In some embodiments, particularly those embodiments wherein the CasX protein is a nickase, a CasX variant protein has decreased target strand loading for single strand nicking. Variants with decreased target strand loading may be generated, for example, through amino acid changes in the TSL domain.

[0325] Exemplary methods for characterizing the catalytic activity of CasX proteins may include, but are not limited to, in vitro cleavage assays, including those of the Examples, below. In some embodiments, electrophoresis of DNA products on agarose gels can interrogate the kinetics of strand cleavage.

[0326] r. Affinity for SOD1 Target RNA

[0327] In some embodiments, a ribonucleoprotein complex comprising a reference CasX protein or variant thereof binds to a target SOD1 RNA and cleaves the target nucleic acid. In some embodiments, variants of a reference CasX protein increase the specificity of the CasX variant protein for a target SOD1 RNA, and increase the activity of the CasX variant protein with respect to a target RNA when compared to the reference CasX protein. For example, CasX variant proteins can display increased binding affinity for target RNAs, or increased cleavage of target RNAs, when compared to reference CasX proteins. In some embodiments, a ribonucleoprotein complex comprising a CasX variant protein binds to a target RNA and/or cleaves the target RNA. In some embodiments, a CasX variant has at least about two-fold to about 10-fold increased binding affinity to the SOD1 target nucleic acid compared to the reference protein of SEQ ID NO: 1, SEQ ID NO: 2, or SEQ ID NO: 3.

[0328] s. Combinations of Mutations

[0329] The present disclosure provides Cas X variants that are a combination of mutations from separate CasX variant proteins. In some embodiments, any variant to any domain described herein can be combined with other variants described herein. In some embodiments, any variant within any domain described herein can be combined with other variants described herein, in the same domain. Combinations of different amino acid changes may in some embodiments produce new optimized variants whose function is further improved by the combination of amino acid changes. In some embodiments, the effect of combining amino acid changes on CasX protein function is linear. As used herein, a combination that is linear refers to a combination whose effect on function is equal to the sum of the effects of each individual amino acid change when assayed in isolation. In some embodiments, the effect of combining amino acid changes on CasX protein function is synergistic. As used herein, a combination of variants that is synergistic refers to a combination whose effect on function is greater than the sum of the effects of each individual amino acid change when assayed in isolation. In some embodiments, combining amino acid changes produces CasX variant proteins in which more than one function of the CasX protein has been improved relative to the reference CasX protein.

[0330] t. CasX Fusion Proteins

[0331] In some embodiments, the disclosure provides CasX proteins comprising a heterologous protein fused to the CasX. In some cases, the CasX is a reference CasX protein. In other cases, the CasX is a CasX variant of any of the embodiments described herein.

[0332] In some embodiments, the CasX variant protein is fused to one or more proteins or domains thereof that has a different activity of interest, resulting in a fusion protein. For example, in some embodiments, the CasX variant protein is fused to a protein (or domain thereof) that inhibits transcription, modifies a target nucleic acid, or modifies a polypeptide associated with a nucleic acid (e.g., histone modification).

[0333] In some embodiments, a heterologous polypeptide (or heterologous amino acid such as a cysteine residue or a non-natural amino acid) can be inserted at one or more positions within a CasX protein to generate a CasX fusion protein. In other embodiments, a cysteine residue can be inserted at one or more positions within a CasX protein followed by conjugation of a heterologous polypeptide described below. In some alternative embodiments, a heterologous polypeptide or heterologous amino acid can be added at the N- or C-terminus of the reference or CasX variant protein. In other embodiments, a heterologous polypeptide or heterologous amino acid can be inserted internally within the sequence of the CasX protein.

[0334] In some embodiments, the reference CasX or variant fusion protein retains RNA-guided sequence specific target nucleic acid binding and cleavage activity. In some cases, the reference CasX or variant fusion protein has (retains) 50% or more of the activity (e.g., cleavage and/or binding activity) of the corresponding reference CasX or variant protein that does not have the insertion of the heterologous protein. In some cases, the reference CasX or variant fusion protein retains at least about 60%, or at least about 70% or more, at least about 80%, or at least about 90%, or at least about 92%, or at least about 95%, or at least about 98%, or at least about 100% of the activity (e.g., cleavage and/or binding activity) of the corresponding CasX protein that does not have the insertion of the heterologous protein.

[0335] In some cases, the reference CasX or variant fusion protein retains (has) target nucleic acid binding activity relative to the activity of the CasX protein without the inserted heterologous amino acid or heterologous polypeptide. In some cases, the reference CasX or variant fusion protein retains at least about 60%, or at least about 70% or more, at least about 80%, or at least about 90%, or at least about 92%, or at least about 95%, or at least about 98%, or at least about 100% of the binding activity of the corresponding CasX protein that does not have the insertion of the heterologous protein.

[0336] In some cases, the reference CasX or variant fusion protein retains (has) target nucleic acid binding and/or cleavage activity relative to the activity of the parent CasX protein without the inserted heterologous amino acid or heterologous polypeptide. For example, in some cases, the reference CasX or variant fusion protein has (retains) 50% or more of the binding and/or cleavage activity of the corresponding parent CasX protein (the CasX protein that does not have the insertion). For example, in some cases, the reference CasX or variant fusion protein has (retains) 60% or more (70% or more, 80% or more, 90% or more, 92% or more, 95% or more, 98% or more, or 100%) of the binding and/or cleavage activity of the corresponding CasX parent protein (the CasX protein that does not have the insertion). Methods of measuring cleaving and/or binding activity of a CasX protein and/or a CasX fusion protein will be known to one of ordinary skill in the art and any convenient method can be used.

[0337] A variety of heterologous polypeptides are suitable for inclusion in a reference CasX or CasX variant fusion protein of the disclosure. In some cases, the fusion partner can modulate transcription (e.g., inhibit transcription, increase transcription) of a target DNA. For example, in some cases the fusion partner is a protein (or a domain from a protein) that inhibits transcription (e.g., a transcriptional repressor, a protein that functions via recruitment of transcription inhibitor proteins, modification of target DNA such as methylation, recruitment of a DNA modifier, modulation of histones associated with target DNA, recruitment of a histone modifier such as those that modify acetylation and/or methylation of histones, and the like). In some cases the fusion partner is a protein (or a domain from a protein) that increases transcription (e.g., a transcription activator, a protein that acts via recruitment of transcription activator proteins, modification of target DNA such as demethylation, recruitment of a DNA modifier, modulation of histones associated with target DNA, recruitment of a histone modifier such as those that modify acetylation and/or methylation of histones, and the like).

[0338] In some cases, a fusion partner has enzymatic activity that modifies a target nucleic acid; e.g., nuclease activity, methyltransferase activity, demethylase activity, DNA repair activity, DNA damage activity, deamination activity, dismutase activity, alkylation activity, depurination activity, oxidation activity, pyrimidine dimer forming activity, integrase activity, transposase activity, recombinase activity, polymerase activity, ligase activity, helicase activity, photolyase activity or glycosylase activity.

[0339] In some cases, a fusion partner has enzymatic activity that modifies a polypeptide (e.g., a histone) associated with a target nucleic acid (e.g., methyltransferase activity, demethylase activity, acetyltransferase activity, deacetylase activity, kinase activity, phosphatase activity, ubiquitin ligase activity, deubiquitinating activity, adenylation activity, deadenylation activity, SUMOylating activity, deSUMOylating activity, ribosylation activity, deribosylation activity, myristoylation activity or demyristoylation activity).

[0340] Examples of proteins (or fragments thereof) that can be used as a fusion partner to increase transcription include but are not limited to: transcriptional activators such as VP16, VP64, VP48, VP160, p65 subdomain (e.g., from NFkB), and activation domain of EDLL and/or TAL activation domain (e.g., for activity in plants); histone lysine methyltransferases such as SET domain containing 1A, histone lysine methyltransferase (SET1A), SET domain containing 1B, histone lysine methyltransferase (SET1B), lysine methyltransferase (MLL1 to 5), ASCL1 (ASH1) achaete-scute family bHLH transcription factor 1 (ASH1), SET and MYND domain containing 2 (SYMD2), nuclear receptor binding SET domain protein 1 (NSD1), and the like; histone lysine demethylases such as lysine demethylase 3A (JHDM2a)/Lysine-specific demethylase 3B (JHDM2b), lysine demethylase 6A (UTX), lysine demethylase 6B (JMJD3), and the like; histone acetyltransferases such as lysine acetyltransferase 2A (GCN5), lysine acetyltransferase 2B (PCAF), CREB binding protein (CBP), E1A binding protein p300 (p300), TATA-box binding protein associated factor 1 (TAF1), lysine acetyltransferase 5 (TIP60/PLIP), lysine acetyltransferase 6A (MOZ/MYST3), lysine acetyltransferase 6B (MORF/MYST4), SRC proto-oncogene, non-receptor tyrosine kinase (SRC1), nuclear receptor coactivator 3 (ACTR), MYB binding protein 1a (P160), clock circadian regulator (CLOCK), and the like; and DNA demethylases such as Ten-Eleven Translocation (TET) dioxygenase 1 (TET1CD), tet methylcytosine dioxygenase 1 (TET1), demeter (DME), demeter-like 1 (DML1), demeter-like 2 (DML2), protein ROS1 (ROS1), and the like.

[0341] Examples of proteins (or fragments thereof) that can be used as a fusion partner to decrease transcription include but are not limited to: transcriptional repressors such as the Kruppel associated box (KRAB or SKD); KOX1 repression domain; the Mad mSIN3 interaction domain (SID); the ERF repressor domain (ERD), the SRDX repression domain (e.g., for repression in plants), and the like; histone lysine methyltransferases such as PR/SET domain containing protein (Pr-SET7/8), lysine methyltransferase 5B (SUV4-20H1), PR/SET domain 2 (RIZ1), and the like; histone lysine demethylases such as lysine demethylase 4A (JMJD2A/JHDM3A), lysine demethylase 4B (JMJD2B), lysine demethylase 4C (JMJD2C/GASC1), lysine demethylase 4D (JMJD2D), lysine demethylase 5A (JARID1A/RBP2), lysine demethylase 5B (JARID1B/PLU-1), lysine demethylase 5C (JARID 1C/SMCX), lysine demethylase 5D (JARID1D/SMCY), and the like; histone lysine deacetylases such as histone deacetylase 1 (HDAC1), HDAC2, HDAC3, HDAC8, HDAC4, HDAC5, HDAC7, HDAC9, sirtuin 1 (SIRT1), SIRT2, HDAC11, and the like; DNA methylases such as HhaI DNA m5c-methyltransferase (M.HhaI), DNA methyltransferase 1 (DNMT1), DNA methyltransferase 3a (DNMT3a), DNA methyltransferase 3b (DNMT3b), methyltransferase 1 (MET1), S-adenosyl-L-methionine-dependent methyltransferases superfamily protein (DRM3) (plants), DNA cytosine methyltransferase MET2a (ZMET2), chromomethylase 1 (CMT1), chromomethylase 2 (CMT2) (plants), and the like; and periphery recruitment elements such as Lamin A, Lamin B, and the like.

[0342] In some cases, the fusion partner has enzymatic activity that modifies the target nucleic acid (e.g., ssRNA, dsRNA, ssDNA, dsDNA). Examples of enzymatic activity that can be provided by the fusion partner include but are not limited to: nuclease activity such as that provided by a restriction enzyme (e.g., FokI nuclease), methyltransferase activity such as that provided by a methyltransferase (e.g., Hhal DNA m5c-methyltransferase (M.Hhal), DNA methyltransferase 1 (DNMT1), DNA methyltransferase 3a (DNMT3a), DNA methyltransferase 3b (DNMT3b), MET1, DRM3 (plants), ZMET2, CMT1, CMT2 (plants), and the like); demethylase activity such as that provided by a demethylase (e.g., Ten-Eleven Translocation (TET) dioxygenase 1 (TET 1 CD), TET1, DME, DML1, DML2, ROS1, and the like), DNA repair activity, DNA damage activity, deamination activity such as that provided by a deaminase (e.g., a cytosine deaminase enzyme, e.g., an APOBEC protein such as rat apolipoprotein B mRNA editing enzyme, catalytic polypeptide 1 {APOBEC1}), dismutase activity, alkylation activity, depurination activity, oxidation activity, pyrimidine dimer forming activity, integrase activity such as that provided by an integrase and/or resolvase (e.g., Gin invertase such as the hyperactive mutant of the Gin invertase, GinH106Y; human immunodeficiency virus type 1 integrase (IN); Tn3 resolvase; and the like), transposase activity, recombinase activity such as that provided by a recombinase (e.g., catalytic domain of Gin recombinase), polymerase activity, ligase activity, helicase activity, photolyase activity, and glycosylase activity).

[0343] In some cases, a reference CasX or CasX variant protein of the present disclosure is fused to a polypeptide selected from a domain for increasing transcription (e.g., a VP16 domain, a VP64 domain), a domain for decreasing transcription (e.g., a KRAB domain, e.g., from the Kox1 protein), a core catalytic domain of a histone acetyltransferase (e.g., histone acetyltransferase p300), a protein/domain that provides a detectable signal (e.g., a fluorescent protein such as GFP), a nuclease domain (e.g., a Fokl nuclease), or a base editor (e.g., cytidine deaminase such as APOBEC1).

[0344] In some cases, the fusion partner has enzymatic activity that modifies a protein associated with the target nucleic acid (e.g., ssRNA, dsRNA, ssDNA, dsDNA) (e.g., a histone, an RNA binding protein, a DNA binding protein, and the like). Examples of enzymatic activity (that modifies a protein associated with a target nucleic acid) that can be provided by the fusion partner include but are not limited to: methyltransferase activity such as that provided by a histone methyltransferase (HMT) (e.g., suppressor of variegation 3-9 homolog 1 (SUV39H1, also known as KMT1A), euchromatic histone lysine methyltransferase 2 (G9A, also known as KMT1C and EHMT2), SUV39H2, ESET/SETDB 1, and the like, SET1A, SET1B, MLL1 to 5, ASH1, SYMD2, NSD1, DOT1L, Pr-SET7/8, SUV4-20H1, EZH2, RIZ1), demethylase activity such as that provided by a histone demethylase (e.g., Lysine Demethylase 1A (KDM1A also known as LSD1), JHDM2a/b, JMJD2A/JHDM3A, JMJD2B, JMJD2C/GASC1, JMJD2D, JARID1A/RBP2, JARID1B/PLU-1, JARID1C/SMCX, JARID1D/SMCY, UTX, JMJD3, and the like), acetyltransferase activity such as that provided by a histone acetylase transferase (e.g., catalytic core/fragment of the human acetyltransferase p300, GCN5, PCAF, CBP, TAF1, TIP60/PLIP, MOZ/MYST3, MORF/MYST4, HBO1/MYST2, HMOF/MYST1, SRC1, ACTR, P160, CLOCK, and the like), deacetylase activity such as that provided by a histone deacetylase (e.g., HDAC1, HDAC2, HDAC3, HDAC8, HDAC4, HDAC5, HDAC7, HDAC9, SIRT1, SIRT2, HDAC11, and the like), kinase activity, phosphatase activity, ubiquitin ligase activity, deubiquitinating activity, adenylation activity, deadenylation activity, SUMOylating activity, deSUMOylating activity, ribosylation activity, deribosylation activity, myristoylation activity, and demyristoylation activity.

[0345] Additional examples of suitable fusion partners are (i) a dihydrofolate reductase (DHFR) destabilization domain (e.g., to generate a chemically controllable subject RNA-guided polypeptide or a conditionally active RNA-guided polypeptide), and (ii) a chloroplast transit peptide.

[0346] Suitable chloroplast transit peptides include, but are not limited to:

(SEQ ID NO: 132)
MASMISSSAVTTVSRASRGQSAAMAPFGGLKSMTGFPVRKVNTDITSITSN
GGRVKCMQVWPPIGKKKFETLSYLPPLTRDSRA;
(SEQ ID NO: 133)
MASMISSSAVTTVSRASRGQSAAMAPFGGLKSMTGFPVRKVNTDITSITSN
GGRVKS;
(SEQ ID NO: 134)
MASSMLSSATMVASPAQATMVAPFNGLKSSAAFPATRKANNDITSITSNGG
RVNCMQVWPPIEKKKFETLSYLPDLTDSGGRVNC;
(SEQ ID NO: 135)
MAQVSRICNGVQNPSLISNLSKSSQRKSPLSVSLKTQQHPRAYPISSSWGL
KKSGMTLIGSELRPLKVMSSVSTAC;
(SEQ ID NO: 136)
MAQVSRICNGVWNPSLISNLSKSSQRKSPLSVSLKTQQHPRAYPISSSWGL
KKSGMTLIGSELRPLKVMSSVSTAC;
(SEQ ID NO: 137)
MAQINNMAQGIQTLNPNSNFHKPQVPKSSSFLVFGSKKLKNSANSMLVLKK
DSIFMQLFCSFRISASVATAC;
(SEQ ID NO: 138)
MAALVTSQLATSGTVLSVTDRFRRPGFQGLRPRNPADAALGMRTVGASAAP
KQSRKPHRFDRRCLSMVV;
(SEQ ID NO: 139)
MAALTTSQLATSATGFGIADRSAPSSLLRHGFQGLKPRSPAGGDATSLSVT
TSARATPKQQRSVQRGSRRFPSVVVC;
(SEQ ID NO: 12496)
MASSVLSSAAVATRSNVAQANMVAPFTGLKSAASFPVSRKQNLDITSIASN
GGRVQC;
(SEQ ID NO: 140)
MESLAATSVFAPSRVAVPAARALVRAGTVVPTRRTSSTSGTSGVKCSAAVT
PQASPVISRSAAAA;
and
(SEQ ID NO: 141)
MGAAATSMQSLKFSNRLVPPSRRLSPVPNNVTCNNLPKSAAPVRTVKCCAS
SWNSTINGAAATTNGASAASS.

[0347] In some cases, a reference CasX or variant protein of the present disclosure can include an endosomal escape peptide. In some cases, an endosomal escape polypeptide comprises the amino acid sequence GLFXALLXLLXSLWXLLLXA (SEQ ID NO: 142), wherein each X is independently selected from lysine, histidine, and arginine. In some cases, an endosomal escape polypeptide comprises the amino acid sequence GLFHALLHLLHSLWHLLLHA (SEQ ID NO: 143), or HHHHHHHHH (SEQ ID NO: 144).

[0348] Non-limiting examples of fusion partners for use when targeting ssRNA target nucleic acids include (but are not limited to): splicing factors (e.g., RS domains); protein translation components (e.g., translation initiation, elongation, and/or release factors; e.g., eIF4G); RNA methylases; RNA editing enzymes (e.g., RNA deaminases, e.g., adenosine deaminase acting on RNA (ADAR), including A to I and/or C to U editing enzymes); helicases; RNA-binding proteins; and the like. It is understood that a heterologous polypeptide can include the entire protein or, in some cases, can include a fragment of the protein (e.g., a functional domain).

[0349] A fusion partner for a reference CasX or CasX variant can be any domain capable of interacting with ssRNA (which, for the purposes of this disclosure, includes intramolecular and/or intermolecular secondary structures, e.g., double-stranded RNA duplexes such as hairpins, stem-loops, etc.), whether transiently or irreversibly, directly or indirectly, including but not limited to an effector domain selected from the group comprising; endonucleases (for example RNase III, the CRR22 DYW domain, Dicer, and PIN (PilT N-terminus) domains from proteins such as SMG5 and SMG6); proteins and protein domains responsible for stimulating RNA cleavage (for example cleavage and polyadenylation specific factor {CPSF}, cleavage stimulation factor {CstF}, CFIm and CFIIm); exonucleases (for example chromatin-binding exonuclease XRN1 (XRN-1) or Exonuclease T); deadenylases (for example DNA 5′-adenosine monophosphate hydrolase {HNT3}); proteins and protein domains responsible for nonsense mediated RNA decay (for example UPF1 RNA helicase and ATPase {UPF1}, UPF2, UPF3, UPF3b, RNP SI, RNA binding motif protein 8A {Y14}, DEK proto-oncogene {DEK}, RNA-processing protein REF2 {REF2}, and Serine-arginine repetitive matrix 1 {SRm160}); proteins and protein domains responsible for stabilizing RNA (for example poly(A) binding protein cytoplasmic 1 {PABP}); proteins and protein domains responsible for repressing translation (for example argonaute RISC catalytic component 2 {Ago2} and Ago4); proteins and protein domains responsible for stimulating translation (for example Staufen); proteins and protein domains responsible for (e.g., capable of) modulating translation (e.g., translation factors such as initiation factors, elongation factors, release factors, etc., e.g., eIF4G); proteins and protein domains responsible for polyadenylation of RNA (for example poly(A) polymerase (PAP1), PAP-associated domain-containing protein; Poly(A) RNA polymerase gld-2 {GLD-2}, and Star-PAP); proteins and protein domains responsible for polyuridinylation of RNA (for example Terminal uridylyltransferase {CID1} and terminal uridylate transferase); proteins and protein domains responsible for RNA localization (for example from insulin like growth factor 2 mRNA binding protein 1 {IMP1}, Z-DNA binding protein 1 {ZBP1}, She2p, She3p, and Bicaudal-D); proteins and protein domains responsible for nuclear retention of RNA (for example Rrp6); proteins and protein domains responsible for nuclear export of RNA (for example nuclear RNA export factor 1 {TAP}, nuclear RNA export factor 1 {NXF1}, THO Complex {THO}, TREX, REF, and Aly/REF export factor {Aly}); proteins and protein domains responsible for repression of RNA splicing (for example polypyrimidine tract binding protein 1 {PTB}, KH RNA binding domain containing, signal transduction associated 1 Sam68}, and heterogeneous nuclear ribonucleoprotein A1 {hnRNP A1}); proteins and protein domains responsible for stimulation of RNA splicing (for example serine/arginine-rich (SR) domains); proteins and protein domains responsible for reducing the efficiency of transcription (for example FUS RNA binding protein {FUS (TLS)}); and proteins and protein domains responsible for stimulating transcription (for example cyclin dependent kinase 7 {CDK7} and HIV Tat). Alternatively, the effector domain may be selected from the group comprising endonucleases; proteins and protein domains capable of stimulating RNA cleavage; exonucleases; deadenylases; proteins and protein domains having nonsense mediated RNA decay activity; proteins and protein domains capable of stabilizing RNA; proteins and protein domains capable of repressing translation; proteins and protein domains capable of stimulating translation; proteins and protein domains capable of modulating translation (e.g., translation factors such as initiation factors, elongation factors, release factors, etc., e.g., eIF4G); proteins and protein domains capable of polyadenylation of RNA; proteins and protein domains capable of polyuridinylation of RNA; proteins and protein domains having RNA localization activity; proteins and protein domains capable of nuclear retention of RNA; proteins and protein domains having RNA nuclear export activity; proteins and protein domains capable of repression of RNA splicing; proteins and protein domains capable of stimulation of RNA splicing; proteins and protein domains capable of reducing the efficiency of transcription; and proteins and protein domains capable of stimulating transcription. Another suitable heterologous polypeptide is a PUF RNA-binding domain, which is described in more detail in WO2012068627, which is hereby incorporated by reference in its entirety.

[0350] Some RNA splicing factors that can be used (in whole or as fragments thereof) as a fusion partner have modular organization, with separate sequence-specific RNA binding modules and splicing effector domains. For example, members of the serine/arginine-rich (SR) protein family contain N-terminal RNA recognition motifs (RRMs) that bind to exonic splicing enhancers (ESEs) in pre-mRNAs and C-terminal RS domains that promote exon inclusion. As another example, the hnRNP protein hnRNP Al binds to exonic splicing silencers (ESSs) through its RRM domains and inhibits exon inclusion through a C-terminal glycine-rich domain. Some splicing factors can regulate alternative use of splice site (ss) by binding to regulatory sequences between the two alternative sites. For example, ASF/SF2 can recognize ESEs and promote the use of intron proximal sites, whereas hnRNP Al can bind to ESSs and shift splicing towards the use of intron distal sites. One application for such factors is to generate ESFs that modulate alternative splicing of endogenous genes, particularly disease associated genes. For example, BCL2 like 1 (Bcl-x) pre-mRNA produces two splicing isoforms with two alternative 5′ splice sites to encode proteins of opposite functions. The long splicing isoform Bcl-xL is a potent apoptosis inhibitor expressed in long-lived post mitotic cells and is up-regulated in many cancer cells, protecting cells against apoptotic signals. The short isoform Bcl-xS is a pro-apoptotic isoform and expressed at high levels in cells with a high turnover rate (e.g., developing lymphocytes). The ratio of the two Bcl-x splicing isoforms is regulated by multiple cc-elements that are located in either the core exon region or the exon extension region (i.e., between the two alternative 5′ splice sites). For more examples, see WO2010075303, which is hereby incorporated by reference in its entirety.

[0351] Further suitable fusion partners include, but are not limited to proteins (or fragments thereof) that are boundary elements (e.g., CTCF), proteins and fragments thereof that provide periphery recruitment (e.g., Lamin A, Lamin B, etc.), and protein docking elements (e.g., FKBP/FRB, Pill/Abyl, etc.).

[0352] In some cases, a heterologous polypeptide (a fusion partner) provides for subcellular localization, i.e., the heterologous polypeptide contains a subcellular localization sequence (e.g., a nuclear localization signal (NLS) for targeting to the nucleus, a sequence to keep the fusion protein out of the nucleus, e.g., a nuclear export sequence (NES), a sequence to keep the fusion protein retained in the cytoplasm, a mitochondrial localization signal for targeting to the mitochondria, a chloroplast localization signal for targeting to a chloroplast, an ER retention signal, and the like). In some embodiments, a subject RNA-guided polypeptide or a conditionally active RNA-guided polypeptide and/or subject CasX fusion protein does not include a NLS so that the protein is not targeted to the nucleus (which can be advantageous, e.g., when the target nucleic acid is an RNA that is present in the cytosol). In some embodiments, a fusion partner can provide a tag (i.e., the heterologous polypeptide is a detectable label) for ease of tracking and/or purification (e.g., a fluorescent protein, e.g., green fluorescent protein (GFP), yellow fluorescent protein (YFP), red fluorescent protein (RFP), cyan fluorescent protein (CFP), mCherry, tdTomato, and the like; a histidine tag, e.g., a 6XHis tag; a hemagglutinin (HA) tag; a FLAG tag; a Myc tag; and the like).

[0353] In some cases, a reference or CasX variant protein includes (is fused to) a nuclear localization signal (NLS). In some cases, a reference or CasX variant protein is fused to 2 or more, 3 or more, 4 or more, or 5 or more 6 or more, 7 or more, 8 or more NLSs. In some cases, one or more NLSs (2 or more, 3 or more, 4 or more, or 5 or more NLSs) are positioned at or near (e.g., within 50 amino acids of) the N-terminus and/or the C-terminus. In some cases, one or more NLSs (2 or more, 3 or more, 4 or more, or 5 or more NLSs) are positioned at or near (e.g., within 50 amino acids of) the N-terminus. In some cases, one or more NLSs (2 or more, 3 or more, 4 or more, or 5 or more NLSs) are positioned at or near (e.g., within 50 amino acids of) the C-terminus. In some cases, one or more NLSs (2 or more, 3 or more, 4 or more, or 5 or more NLSs) are positioned at or near (e.g., within 50 amino acids of) both the N-terminus and the C-terminus. In some cases, an NLS is positioned at the N-terminus and an NLS is positioned at the C-terminus. In some cases, a reference or CasX variant protein includes (is fused to) between 1 and 10 NLSs (e.g., 1-9, 1-8, 1-7, 1-6, 1-5, 2-10, 2-9, 2-8, 2-7, 2-6, or 2-5 NLSs). In some cases, a reference or CasX variant protein includes (is fused to) between 2 and 5 NLSs (e.g., 2-4, or 2-3 NLSs).

[0354] Non-limiting examples of NLSs include sequences derived from: the NLS of the SV40 virus large T-antigen, having the amino acid sequence PKKKRKV (SEQ ID NO: 145); the NLS from nucleoplasmin (e.g., the nucleoplasmin bipartite NLS with the sequence KRPAATKKAGQAKKKK (SEQ ID NO: 146); the c-myc NLS having the amino acid sequence PAAKRVKLD (SEQ ID NO: 147) or RQRRNELKRSP (SEQ ID NO: 148); the hRNPAl M9 NLS having the sequence NQSSNFGPMKGGNFGGRSSGPYGGGGQYFAKPRNQGGY (SEQ ID NO: 149); the sequence RMRIZFKNKGKDTAELRRRRVEVSVELRKAKKDEQILKRRNV (SEQ ID NO: 150) of the IBB domain from importin-alpha; the sequences VSRKRPRP (SEQ ID NO: 151) and PPKKARED (SEQ ID NO: 152) of the myoma T protein; the sequence PQPKKKPL (SEQ ID NO: 153) of human p53; the sequence SALIKKKKKMAP (SEQ ID NO: 154) of mouse c-abl IV; the sequences DRLRR (SEQ ID NO: 155) and PKQKKRK (SEQ ID NO: 156) of the influenza virus NS1; the sequence RKLKKKIKKL (SEQ ID NO: 157) of the Hepatitis virus delta antigen; the sequence REKKKFLKRR (SEQ ID NO: 158) of the mouse Mxl protein; the sequence KRKGDEVDGVDEVAKKKSKK (SEQ ID NO: 159) of the human poly(ADP-ribose) polymerase; the sequence RKCLQAGMNLEARKTKK (SEQ ID NO: 160) of the steroid hormone receptors (human) glucocorticoid; the sequence PRPRKIPR (SEQ ID NO: 161) of Borna disease virus P protein (BDV-P1); the sequence PPRKKRTVV (SEQ ID NO: 162) of hepatitis C virus nonstructural protein (HCV-NS5A); the sequence NLSKKKKRKREK (SEQ ID NO: 163) of LEF1; the sequence RRPSRPFRKP (SEQ ID NO: 164) of ORF57 simirae; the sequence KRPRSPSS (SEQ ID NO: 165) of EBV LANA; the sequence KRGINDRNFWRGENERKTR (SEQ ID NO: 166) of Influenza A protein; the sequence PRPPKMARYDN (SEQ ID NO: 167) of human RNA helicase A (RHA); the sequence KRSFSKAF (SEQ ID NO: 168) of nucleolar RNA helicase II; the sequence KLKIKRPVK (SEQ ID NO: 169) of TUS-protein; the sequence PKKKRKVPPPPAAKRVKLD (SEQ ID NO: 170) associated with importin-alpha; the sequence PKTRRRPRRSQRKRPPT (SEQ ID NO: 171) from the Rex protein in HTLV-1; the sequence MSRRRKANPTKLSENAKKLAKEVEN (SEQ ID NO: 172) from the EGL-13 protein of Caenorhabditis elegans; and the sequences KTRRRPRRSQRKRPPT (SEQ ID NO: 173), RRKKRRPRRKKRR (SEQ ID NO: 174), PKKKSRKPKKKSRK (SEQ ID NO: 175), HKKKHPDASVNFSEFSK (SEQ ID NO: 176), QRPGPYDRPQRPGPYDRP (SEQ ID NO: 177), LSPSLSPLLSPSLSPL (SEQ ID NO: 178), RGKGGKGLGKGGAKRHRK (SEQ ID NO: 179), PKRGRGRPKRGRGR (SEQ ID NO: 180), PKKKRKVPPPPAAKRVKLD (SEQ ID NO: 181) and PKKKRKVPPPPKKKRKV (SEQ ID NO: 182). In general, NLS (or multiple NLSs) are of sufficient strength to drive accumulation of a reference or CasX variant fusion protein in the nucleus of a eukaryotic cell. Detection of accumulation in the nucleus may be performed by any suitable technique. For example, a detectable marker may be fused to a reference or CasX variant fusion protein such that location within a cell may be visualized. Cell nuclei may also be isolated from cells, the contents of which may then be analyzed by any suitable process for detecting protein, such as immunohistochemistry, Western blot, or enzyme activity assay. Accumulation in the nucleus may also be determined.

[0355] In some cases, a reference or CasX variant fusion protein includes a “Protein Transduction Domain” or PTD (also known as a CPP—cell penetrating peptide), which refers to a protein, polynucleotide, carbohydrate, or organic or inorganic compound that facilitates traversing a lipid bilayer, micelle, cell membrane, organelle membrane, or vesicle membrane. A PTD attached to another molecule, which can range from a small polar molecule to a large macromolecule and/or a nanoparticle, facilitates the molecule traversing a membrane, for example going from an extracellular space to an intracellular space, or from the cytosol to within an organelle. In some embodiments, a PTD is covalently linked to the amino terminus of a reference or CasX variant fusion protein. In some embodiments, a PTD is covalently linked to the carboxyl terminus of a reference or CasX variant fusion protein. In some cases, the PTD is inserted internally in the sequence of a reference or CasX variant fusion protein at a suitable insertion site. In some cases, a reference or CasX variant fusion protein includes (is conjugated to, is fused to) one or more PTDs (e.g., two or more, three or more, four or more PTDs). In some cases, a PTD includes one or more nuclear localization signals (NLS). Examples of PTDs include but are not limited to peptide transduction domain of HIV TAT comprising YGRKKRRQRRR (SEQ ID NO: 183), RKKRRQRR (SEQ ID NO: 184); YARAAARQARA (SEQ ID NO: 185); THRLPRRRRRR (SEQ ID NO: 186); and GGRRARRRRRR (SEQ ID NO: 187); a polyarginine sequence comprising a number of arginines sufficient to direct entry into a cell (e.g., 3, 4, 5, 6, 7, 8, 9, 10, or 10-50 arginines (SEQ ID NO: 188)); a VP22 domain (Zender et al. (2002) Cancer Gene Ther. 9(6):489-96); an Drosophila Antennapedia protein transduction domain (Noguchi et al. (2003) Diabetes 52(7): 1732-1737); a truncated human calcitonin peptide (Trehin et al. (2004) Pharm. Research 21:1248-1256); polylysine (Wender et al. (2000) Proc. Natl. Acad. Sci. USA 97: 13003-13008); RRQRRTSKLMKR (SEQ ID NO: 189); Transportan GWTLNSAGYLLGKINLKALAALAKKIL (SEQ ID NO: 190); KALAWEAKLAKALAKALAKHLAKALAKALKCEA (SEQ ID NO: 191); and RQIKIWFQNRRMKWKK (SEQ ID NO: 192). In some embodiments, the PTD is an activatable CPP (ACPP) (Aguilera et al. (2009) Integr Biol (Camb) June; 1(5-6): 371-381). ACPPs comprise a polycationic CPP (e.g., Arg9 or “R9”) connected via a cleavable linker to a matching polyanion (e.g., Glu9 or “E9”), which reduces the net charge to nearly zero and thereby inhibits adhesion and uptake into cells. Upon cleavage of the linker, the polyanion is released, locally unmasking the polyarginine and its inherent adhesiveness, thus “activating” the ACPP to traverse the membrane.

[0356] In some embodiments, a reference or CasX variant fusion protein can include a CasX protein that is linked to an internally inserted heterologous amino acid or heterologous polypeptide (a heterologous amino acid sequence) via a linker polypeptide (e.g., one or more linker polypeptides). In some embodiments, a reference or CasX variant fusion protein can be linked at the C-terminal and/or N-terminal end to a heterologous polypeptide (fusion partner) via a linker polypeptide (e.g., one or more linker polypeptides) The linker polypeptide may have any of a variety of amino acid sequences. Proteins can be joined by a spacer peptide, generally of a flexible nature, although other chemical linkages are not excluded. Suitable linkers include polypeptides of between 4 amino acids and 40 amino acids in length, or between 4 amino acids and 25 amino acids in length. These linkers are generally produced by using synthetic, linker-encoding oligonucleotides to couple the proteins. Peptide linkers with a degree of flexibility can be used. The linking peptides may have virtually any amino acid sequence, bearing in mind that the preferred linkers will have a sequence that results in a generally flexible peptide. The use of small amino acids, such as glycine and alanine, are of use in creating a flexible peptide. The creation of such sequences is routine to those of skill in the art. A variety of different linkers are commercially available and are considered suitable for use. Example linker polypeptides include glycine polymers (G)n, glycine-serine polymer (including, for example, (GS)n, GSGGSn (SEQ ID NO: 193), GGSGGSn (SEQ ID NO: 194), and GGGSn (SEQ ID NO: 195), where n is an integer of at least one), glycine-alanine polymers, alanine-serine polymers, glycine-proline polymers, proline polymers and proline-alanine polymers. Example linkers can comprise amino acid sequences including, but not limited to, GGSG (SEQ ID NO: 196), GGSGG (SEQ ID NO: 197), GSGSG (SEQ ID NO: 198), GSGGG (SEQ ID NO: 199), GGGSG (SEQ ID NO: 200), GSSSG (SEQ ID NO: 201), GPGP (SEQ ID NO: 202), GGP, PPP, PPAPPA (SEQ ID NO: 203), PPPGPPP (SEQ ID NO: 204) and the like. The ordinarily skilled artisan will recognize that design of a peptide conjugated to any elements described above can include linkers that are all or partially flexible, such that the linker can include a flexible linker as well as one or more portions that confer less flexible structure.

[0357] V. CasX:gNA Systems and Methods for Modification of SOD1 Genes

[0358] The CasX proteins, guide nucleic acids, and variants thereof provided herein are useful for various applications, including as therapeutics, diagnostics, and for research. To effect the methods of the disclosure for gene editing, provided herein are programmable CasX:gNA systems. The programmable nature of the CasX:gNA system provided herein allows for the precise targeting to achieve the desired effect (nicking, cleaving, etc.) at one or more regions of predetermined interest in the SOD1 gene target nucleic acid comprising one or more mutations. In some embodiments, the CasX:gNA systems provided herein comprise a CasX variant of Table 4 or a variant having at least 50%, at least 60%, at least 70%, at least 80%, or at least 90%, or at least 95%, or at least 99% sequence identity to a sequence of Table 4, and a gNA (e.g., a gNA variant comprising a sequence of Table 2B, or a variant having at least 50%, at least 60%, at least 70%, at least 80%, or at least 90%, or at least 95%, or at least 99% sequence identity to a sequence of Table 2B) or one or more polynucleotides encoding a CasX variant protein and a gNA, and further comprising a targeting sequence wherein the targeting sequence of the gNA is complementary to, and therefore is capable of hybridizing with, a SOD1 target nucleic acid. In the foregoing embodiment, the targeting sequence can be a sequence of Table 3, or a sequence having at least about 65%, at least about 75%, at least about 85%, or at least about 95% identity thereto. In some cases, the CasX:gNA system further comprises a donor template nucleic acid.

[0359] In some embodiments, the disclosure provides methods of modifying a SOD1 target nucleic acid comprising one or more mutations in a population of cells, the method comprising introducing into each cell of the population: a) a CasX:gNA system of any of the embodiments described herein; b) nucleic acid encoding a CasX:gNA system of any of the embodiments described herein; c) a vector comprising the nucleic acid of (b); d) a VLP comprising a CasX:gNA system of (a); or e) combinations of two or more of (a)-(d), wherein the SOD1 target nucleic acid sequence of the cells is modified by the CasX protein. In those cases where the CasX is delivered to the cell in the protein form and the gNA is delivered in the RNA form, the CasX and gNA can be pre-complexed and delivered as an RNP. In some embodiments of the method, the targeting sequence of the gNA is selected from a sequence of Table 3, or a sequence having at least about 65%, at least about 75%, at least about 85%, or at least about 95% identity thereto. Upon hybridization with the target nucleic acid by the CasX and the gNA, the CasX introduces one or more single-strand breaks or double-strand breaks within or near the SOD1 gene that result in a modification of the target nucleic acid such as a permanent indel (deletion or insertion), mutation, or correction in the target nucleic acid, as described herein, with a corresponding modulation of expression or alteration in the function of the SOD1 gene product, thereby creating an edited cell. In other embodiments, the method comprises contacting the target nucleic acid sequence with a plurality of gNAs targeted to different or overlapping portions of the SOD1 gene wherein the CasX protein introduces multiple breaks in the target nucleic acid sequence that result in a permanent indel (deletion or insertion), mutation, or correction in the target nucleic acid, as described herein, with a corresponding modulation of expression or alteration in the function of the SOD1 gene product, thereby creating an edited cell. In some embodiments, the method comprises insertion of a donor template into the break site(s) of the SOD1 target nucleic acid sequence of the cells of the population. Depending on whether the system is used to knock-down/knock-out a mutant form of SOD1 or is used to knock-in a corrective sequence, the donor template can be a short single-stranded or double-stranded oligonucleotide, or can be a long single-stranded or double-stranded oligonucleotide. For knock-down/knock-outs, the donor template sequence is typically not identical to the genomic sequence that it replaces. The donor template may contain one or more single base changes, insertions, deletions, inversions or rearrangements with respect to the genomic sequence, provided that there is sufficient homology with the target nucleic acid sequence to support homology-directed repair, which can result in a frame-shift or other mutation such that the non-functional SOD1 protein is not expressed or is expressed at a lower level. In some embodiments, the donor template sequence comprises a non-homologous sequence flanked by two regions of homology to the break sites of the target nucleic acid, facilitating insertion of the non-homologous sequence at the target region which can be mediated by homology-directed repair (HDR) or homology-independent targeted integration (HITI). In other cases, an exogenous donor template may comprise a corrective sequence, wherein the sequence is flanked by an upstream sequence and a downstream sequence with homology adjacent to the break sites in the target nucleic acid, facilitating insertion of the donor template sequence. In a particular embodiment of the foregoing, gNAs targeting the upstream sequence Exon 1 and Intron 1 can be used to introduce breaks that permit the insertion of full length cDNA encoding the SOD1 protein, replacing the mutated endogenous SOD1 gene and restoring protein expression. The exogenous sequence inserted by HITI can be any length, for example, a relatively short sequence of between 1 and 50 nucleotides in length, or a longer sequence of about 50-1000 nucleotides in length. The lack of homology can be, for example, having no more than 20-50% sequence identity and/or lacking in specific hybridization at low stringency. In other cases, the lack of homology can further include a criterion of having no more than 5, 6, 7, 8, or 9 bp identity.

[0360] In some embodiments, the method of the disclosure provides CasX protein and gNA pairs that generate site-specific double strand breaks (DSBs) or single strand breaks (SSBs) (e.g., when the CasX protein is a nickase that can cleave only one strand of a target nucleic acid) within double-stranded DNA (dsDNA) target nucleic acids, which can then be repaired either by non-homologous end joining (NHEJ), homology-directed repair (HDR), homology-independent targeted integration (HITI), micro-homology mediated end joining (MMEJ), single strand annealing (SSA) or base excision repair (BER). In some cases, contacting a SOD1 gene with a gene editing pair occurs under conditions that are permissive for non-homologous end joining or homology-directed repair. Thus, in some cases, the methods provided herein include contacting the SOD1 gene with a donor template by introducing the donor template (either in vitro outside of a cell, in vitro inside a cell, in vivo inside a cell, or ex vivo), wherein the donor template, a portion of the donor template, a copy of the donor template, or a portion of a copy of the donor template integrates into the SOD1 gene to correct the one or more mutations or to replace the defective SOD1 gene. The donor template sequence may comprise certain sequence differences as compared to the genomic sequence, e.g., restriction sites, nucleotide polymorphisms, selectable markers (e.g., drug resistance genes, fluorescent proteins, enzymes etc.), etc., which may be used to assess for successful insertion of the donor nucleic acid at the cleavage site or, in some cases, may be used for other purposes (e.g., to signify expression at the targeted genomic locus). Alternatively, these sequence differences may include flanking recombination sequences such as FLPs, loxP sequences, or the like, that can be activated at a later time for removal of the marker sequence.

[0361] In those cases where the modification results in a knock-down or knock-out of the SOD1 gene, expression of the SOD1 protein is reduced by at least about 10%, at least about 20%, at least about 30%, at least about 40%, at least about 50%, at least about 60%, at least about 70%, at least about 80%, or at least about 90% in comparison to cells that have not been modified. In other cases, the SOD1 target nucleic acid of the cells of the population is modified such that expression of the SOD1 protein cannot be detected. In other cases, wherein the modification results in correction of the one or more mutations of the SOD1 gene in the cells of the population (e.g., insertion of a corrective donor template), the modification results in expression of functional SOD1 protein (e.g., the protein of SEQ ID NO: 100) by the modified cells. Expression of a SOD1 protein can be measured by flow cytometry, ELISA, cell-based assays or other methods know in the art (Lee, H., et al. Assay Development for High Content Quantification of SOD1 Mutant Protein Aggregate Formation in Living Cells. J Vis Exp. 128:56425 (2017)), or as described in the Examples.

[0362] In other embodiments of the method of modifying a target nucleic acid sequence, modifying the SOD1 gene comprises binding of a CasX to the target nucleic acid sequence without cleavage. In some embodiments, the CasX is a catalytically inactive CasX (dCasX) protein that retains the ability to bind to the gNA and to the SOD1 target nucleic acid sequence comprising the mutation but lacks the ability to cleave the nucleic acid sequence, thereby interfering with transcription of mutant SOD1 allele. In some embodiments, the dCasX comprises a mutation at residues D672, E769, and/or D935 corresponding to the CasX protein of SEQ ID NO:1 or D659, E756 and/or D922 corresponding to the CasX protein of SEQ ID NO: 2. In some embodiments, the mutation is a substitution of alanine or glycine for the residue.

[0363] In some embodiments of the method, the cells of the modified population are eukaryotic, which can include rodent cells, mouse cells, rat cells, primate cells, non-human primate cells, human cells, embryonic stem (ES) cells, induced pluripotent stem cell (iPSC), central nervous system (CNS) cells, and peripheral nervous system (PNS) cells. In the case of cells of the CNS, the cells can be neuron cells, which can include spinal motor neuron cells or oligodendrocyte cells. In the case of cells of the PNS, the cells can include glial cells or Schwann cells.

[0364] In some embodiments, the disclosure provides methods of modifying a SOD1 target nucleic acid in a population of cells by in vitro or ex vivo methods. In other embodiments, the disclosure provides methods of modifying a SOD1 target nucleic acid in a population of cells in vivo in a subject. In one embodiment of the method of in vivo modification, the method comprises administration of a vector of the embodiments described herein to the subject at a therapeutically effective dose. In one embodiment, the vector is administered to the subject at a dose of at least about 1×10⁸ vector genomes (vg), at least about 1×10⁹ vg, at least about 1×10¹⁰ vg at least about 1×10¹¹ vg, or at least about 1×10¹² vg, or at least about 1×10¹³ vg, or at least about 1×10¹⁴ vg, or at least about 1×10¹⁵ vg, or at least about 1×10¹⁶ vg. In another embodiment of the method of in vivo modification, the method comprises administration of a VLP to the subject at a therapeutically effective dose. In one embodiment, the VLP is administered to the subject at a dose of at least about 1×10⁸ particles, at least about 1×10⁹ particles, at least about 1×10¹⁰ particles at least about 1×10¹¹ particles, or at least about 1×10¹² particles, or at least about 1×10¹³ particles, or at least about 1×10¹⁴ particles, or at least about 1×10¹⁵ particles, or at least about 1×10¹⁶ particles. In the foregoing embodiments of the paragraph, the vector or VLP is administered to the subject by a route of administration selected from intraparenchymal, intravenous, intra-arterial, intracerebroventricular, intracisternal, intrathecal, intracranial, lumbar, intraperitoneal, or combinations thereof.

[0365] In some embodiments of the method of modifying a SOD1 target nucleic acid in a population of cells, the method further comprises contacting the target nucleic acid sequence of the population of cells with: a) an additional CRISPR nuclease and a gNA targeting a different or overlapping portion of the SOD1 target nucleic acid compared to the first gNA; b) a polynucleotide encoding the additional CRISPR nuclease and the gNA of (a); c) a vector comprising the polynucleotide of (b); or d) a VLP comprising the additional CRISPR nuclease and the gNA of (a), wherein the contacting results in modification of the SOD1 target nucleic acid at a different location in the sequence compared to the first gNA. In some cases, the additional CRISPR nuclease is a CasX protein having a sequence different from the CasX protein of any of the preceding claims. In other cases, the additional CRISPR nuclease is not a CasX protein. In other cases, the additional CRISPR nuclease is selected from the group consisting of Cas9, Cas12a, Cas12b, Cas12c, Cas12d (CasY), Cas13a, Cas13b, Cas13c, Cas13d, CasX, CasY, Cas14, Cpf1, C2cl, Csn2, Cas Phi, and sequence variants thereof.

[0366] Methods of introducing a nucleic acid (e.g., a nucleic acid comprising a donor polynucleotide sequence, one or more nucleic acids encoding a CasX protein and/or gNA, or a vector comprising same) into a cell are known in the art, and any convenient method can be used to introduce a nucleic acid (e.g., an expression construct) into a cell. Suitable methods include e.g., viral infection, transfection, lipofection, electroporation, calcium phosphate precipitation, polyethyleneimine (PEI)-mediated transfection, DEAE-dextran mediated transfection, liposome-mediated transfection, particle gun technology, nucleofection, electroporation, direct addition by cell penetrating CasX proteins that are fused to or recruit donor DNA, cell squeezing, calcium phosphate precipitation, direct microinjection, nanoparticle-mediated nucleic acid delivery, and the like.

[0367] In some embodiments of the method, a CasX can be provided as an RNA sequence. The RNA can be provided by direct chemical synthesis, or may be transcribed in vitro from a DNA (e.g., a DNA encoding an mRNA comprising a sequence encoding the CasX protein variant). Once synthesized, the RNA may, for example, be introduced into a cell by any of the well-known techniques for introducing nucleic acids into cells, including, but not limited to microinjection, electroporation, and transfection, for translation into the CasX protein.

[0368] Nucleic acids may be introduced into the cells using well-developed transfection techniques, and the commercially available TransMessenger® reagents from Qiagen, Stemfect™ RNA Transfection Kit from Stemgent, and TransIT®-mRNA Transfection Kit from Mirus Bio LLC, Lonza nucleofection, Maxagen electroporation and the like.

[0369] In other embodiments, the disclosure provides a method of altering a SOD1 target nucleic acid sequence of a cell comprising one or more mutations in the target nucleic acid, comprising contacting said cell with a vector comprising a nucleic acid encoding a CasX:gNA system of the embodiments described herein, wherein the gNA comprises a targeting sequence complementary to the target nucleic acid, and therefore is capable of hybridizing with a sequence encoding the SOD1 protein or the SOD1 regulatory element comprising one or more mutations, or the complement of these sequences. In other embodiments of the method, the vector is a VLP comprising a CasX and gNA complexed in an RNP and, optionally, a donor template (described more fully, supra), wherein the VLP has tropism for the neuronal or glial cells and is able to deliver the RNP for the editing of the SOD1 gene, as described herein. The VLP embodiments utilized in the foregoing method of editing are described herein.

[0370] Introducing recombinant expression vectors comprising sequences encoding the CasX:gNA systems (and, optionally, the donor sequences) of the disclosure into cells under in vitro conditions can occur in any suitable culture media and under any suitable culture conditions that promote the survival of the cells. Introducing recombinant expression vectors into a target cell can be carried out in vivo, in vitro or ex vivo. In some embodiments of the method, vectors may be provided directly to a target host cell. For example, cells may be contacted with vectors comprising the subject nucleic acids (e.g., recombinant expression vectors having the donor template sequence and nucleic acid encoding the CasX and gNA) such that the vectors are taken up by the cells. Methods for contacting cells with nucleic acid vectors that are plasmids include electroporation, calcium chloride transfection, microinjection, and lipofection are well known in the art.

[0371] Vectors used for providing the nucleic acids encoding gNAs and/or CasX proteins to a target host cell can include suitable promoters for driving the expression, that is, transcriptional activation of the nucleic acid of interest. In some cases, the encoding nucleic acid of interest will be operably linked to a promoter. This may include ubiquitously acting promoters, for example, the CMV-beta-actin promoter, or inducible promoters, such as promoters that are active in particular cell populations or that respond to the presence of drugs such as tetracycline or kanamycin. By transcriptional activation, it is intended that transcription will be increased above basal levels in the target host cell comprising the vector by at least about 10-fold, by at least about 100-fold, more usually by at least about 1000-fold. In addition, vectors used for providing a nucleic acid encoding a gNA and/or a CasX protein to a cell may include nucleic acid sequences that encode for selectable markers in the target cells, so as to identify cells that have taken up the CasX protein and/or the gNA.

[0372] For viral vector delivery, cells can be contacted with viral particles comprising the subject viral expression vectors and the nucleic acid encoding the CasX and gNA and, optionally, the donor template. In some embodiments, the vector is an Adeno-Associated Viral (AAV) vector, wherein the AAV is selected from AAV1, AAV2, AAV3, AAV4, AAV5, AAV6, AAV7, AAV8, AAV9, AAV10, AAV-Rh74, or AAVRh10. In other embodiments, the vector is a retroviral vector. In other embodiments, the vector is a lentiviral vector. Retroviruses, for example, lentiviruses, may be suitable for use in methods of the present disclosure. Commonly used retroviral vectors are “defective”, e.g., are unable to produce viral proteins required for productive infection. Rather, replication of the vector requires growth in a packaging cell line. To generate viral particles comprising nucleic acids of interest, the retroviral nucleic acids comprising the nucleic acid are packaged into viral capsids by a packaging cell line. Different packaging cell lines provide a different envelope protein (ecotropic, amphotropic or xenotropic) to be incorporated into the capsid, and this envelope protein determines the specificity or tropisms of the viral particle for the cells (ecotropic for murine and rat; amphotropic for most mammalian cell types including human, dog and mouse; and xenotropic for most mammalian cell types except murine cells). The appropriate packaging cell line may be used to ensure that the cells are targeted by the packaged viral particles. Methods of introducing subject vector expression vectors into packaging cell lines and of collecting the viral particles that are generated by the packaging lines are well known in the art, including U.S. Pat. No. 5,173,414; Tratschin et al., Mol. Cell. Biol. 5:3251-3260 (1985); Tratschin, et al., Mol. Cell. Biol. 4:2072-2081 (1984); Hermonat & Muzyczka, PNAS 81:6466-6470 (1984); and Samulski et al., J. Virol. 63:03822-3828 (1989). Nucleic acids can also be introduced by direct micro-injection (e.g., injection of RNA).

[0373] The present disclosure provides populations of cells modified by the foregoing methods. In some embodiments, the disclosure provides populations of modified cells wherein the cells have been modified such that at least 70%, at least 75%, at least 80%, at least 85%, at least 90%, or at least 95% of the modified cells do not express a detectable level of SOD1 protein. In other embodiments, the disclosure provides populations of modified cells wherein the cells have been modified such that the expression of SOD1 protein is reduced by at least 70%, at least 75%, at least 80%, at least 85%, at least 90%, or at least 95% compared to cells that have not been modified. In other embodiments, the disclosure provides populations of modified cells wherein the mutation of the SOD1 gene is corrected in the modified cells of the population, resulting in expression of functional SOD1 protein (e.g., the protein of SEQ ID NO: 100) by the modified cells. In some cases, the population of modified cells can be used in methods of treatment in a subject having a SOD1-related disorder, such as ALS, described more fully below.

[0374] VI. Polynucleotides and Vectors

[0375] In other embodiments, the present disclosure provides polynucleotides encoding the CasX proteins and the polynucleotides of the gNAs (e.g., the gDNAs and gRNAs) described herein, as well as sequences complementary to polynucleotides encoding the CasX proteins and the gNAs embodiments. In an additional embodiment, the disclosure provides donor template polynucleotides encoding portions or all of an SOD1 gene. In yet further embodiments, the disclosure relates to vectors comprising polynucleotides encoding the CasX proteins and the gNAs described herein. In yet further embodiments, the disclosure provides vectors comprising the donor templates described herein.

[0376] In some embodiments, the disclosure provides polynucleotide sequences encoding the reference CasX of SEQ ID NOS: 1-3. In other embodiments, the disclosure provides polynucleotide sequences encoding the CasX variants of any of the embodiments described herein, including the CasX protein variants of Table 4 or sequences having at least about 50%, at least about 60%, at least about 70%, at least about 80%, or at least about 90%, or at least about 95%, or at least about 96%, or at least about 97%, or at least about 98%, or at least about 99% sequence identity to a sequence of Table 4. In some embodiments, the disclosure provides an isolated polynucleotide sequence encoding a gNA sequence of any of the embodiments described herein, including the sequences of Tables 2A and 2B, together with the targeting sequences of Table 3.

[0377] In some embodiments, the polynucleotide encodes a gNA scaffold sequence set forth in Table 2A or Table 2B, or a sequence having at least about 50%, at least about 60%, at least about 70%, at least about 80%, at least about 90%, at least about 95%, at least about 96%, at least about 97%, at least about 98%, at least about 99% sequence identity thereto. In other embodiments, the disclosure provides a targeting sequence polynucleotide set forth in Table 3, or a sequence having at least about 65%, at least about 75%, at least about 85%, or at least about 95% identity to a sequence provided in Table 3. In some embodiments, the targeting sequence polynucleotide is, in turn, linked to the gNA scaffold sequence; either as a sgNA or a dgNA. In other embodiments, the disclosure provides a targeting polynucleotide having a sequence having one or more single nucleotide polymorphisms (SNP) relative to a sequence provided in Table 3.

[0378] In other embodiments, the disclosure provides an isolated polynucleotide sequence encoding a gNA comprising a targeting sequence that is complementary to, and therefore hybridizes with the SOD1 gene. In other embodiments, the polynucleotide sequence encodes a gNA comprising a targeting sequence that hybridizes with a SOD1 exon. In other embodiments, the polynucleotide sequence encodes a gNA comprising a targeting sequence that hybridizes with a SOD1 intron. In other embodiments, the polynucleotide sequence encodes a gNA comprising a targeting sequence that hybridizes with a SOD1 intron-exon junction. In other embodiments, the polynucleotide sequence encodes a gNA comprising a targeting sequence that hybridizes with an intergenic region of the SOD1 gene. In other embodiments, the polynucleotide sequence encodes a gNA comprising a targeting sequence that hybridizes with a SOD1 regulatory element. In some cases, the SOD1 regulatory element is 5′ of the SOD1 gene. In other cases, the SOD1 regulatory element is 3′ of the SOD1 gene. In some cases, the SOD1 regulatory element is in an intron of the SOD1 gene. In other cases, the SOD1 regulatory element comprises the 5′ UTR of the SOD1 gene. In still other cases, the SOD1 regulatory element comprises the 3′UTR of the SOD1 gene. In some cases of the foregoing embodiment, the SOD1 sequence is a wild-type sequence. In other cases, the SOD1 sequence comprises one or more mutations.

[0379] In other embodiments, the disclosure provides donor template nucleic acids, wherein the donor template comprises a nucleotide sequence having homology to a SOD1 target nucleic acid sequence. In some embodiments, the SOD1 donor template is intended for gene editing and comprises at least a portion of a SOD1 gene. In some embodiments, the SOD1 donor template comprises a sequence that hybridizes with the SOD1 gene. In other embodiments, the SOD1 donor sequence comprises a sequence that encodes at least a portion of a SOD1 exon. In other embodiments, the SOD1 donor sequence has a sequence that encodes at least a portion of a SOD1 intron. In other embodiments, the SOD1 donor sequence has a sequence that encodes at least a portion of with a SOD1 intron-exon junction. In other embodiments, the SOD1 donor sequence has a sequence that encodes at least a portion of an intergenic region of the SOD1 gene. In other embodiments, the SOD1 donor sequence has a sequence that encodes at least a portion of a SOD1 regulatory element. In some cases of the foregoing donor template embodiments, the SOD1 sequence is a wild-type sequence that encodes all or a portion the SOD1 protein (e.g., the protein of SEQ ID NO: 100). In other cases, the SOD1 sequence comprises one or more mutations relative to a wild-type SOD1 gene. In the foregoing embodiments, the donor template ranges in size from 10-15,000 nucleotides. In some embodiments, the donor template is a single-stranded DNA template. In other embodiments, the donor template is a single stranded RNA template. In other embodiments, the donor template is a double-stranded DNA template.

[0380] In other aspects, the disclosure relates to methods to produce polynucleotide sequences encoding the reference CasX, the CasX variants, or the gNA of any of the embodiments described herein, or sequences complementary to the polynucleotide sequences, including homologous variants thereof, as well as methods to express the proteins expressed or RNA transcribed by the polynucleotide sequences. In general, the methods include producing a polynucleotide sequence coding for the reference CasX, the CasX variants, or the gNA of any of the embodiments described herein and incorporating the encoding gene into an expression vector appropriate for a host cell. For production of the encoded reference CasX, the CasX variants, or the gNA of any of the embodiments described herein, the methods include transforming an appropriate host cell with an expression vector comprising the encoding polynucleotide, and culturing the host cell under conditions causing or permitting the resulting reference CasX, the CasX variants, or the gNA of any of the embodiments described herein to be expressed or transcribed in the transformed host cell, thereby producing the reference CasX, the CasX variants, or the gNA, which are recovered by methods described herein or by standard purification methods known in the art. Standard recombinant techniques in molecular biology are used to make the polynucleotides and expression vectors of the present disclosure.

[0381] In accordance with the disclosure, nucleic acid sequences that encode the reference CasX, the CasX variants, or the gNA of any of the embodiments described herein (or their complement) are used to generate recombinant DNA molecules that direct the expression in appropriate host cells. Several cloning strategies are suitable for performing the present disclosure, many of which are used to generate a construct that comprises a gene coding for a composition of the present disclosure. In some embodiments, the cloning strategy is used to create a gene that encodes a construct that comprises nucleotides encoding the reference CasX, the CasX variants, or the gNA that is used to transform a host cell for expression of the composition.

[0382] In some approaches, a construct is first prepared containing the DNA sequence encoding a reference CasX, a CasX variant, or a gNA. Exemplary methods for the preparation of such constructs are described in the Examples. The construct is then used to create an expression vector suitable for transforming a host cell, such as a prokaryotic or eukaryotic host cell for the expression and recovery of the protein construct, in the case of the CasX, or the gNA. Where desired, the host cell is an E. coli. In other embodiments, the host cell is a eukaryotic cell. The eukaryotic host cell can be selected from Baby Hamster Kidney fibroblast (BHK) cells, human embryonic kidney 293 (HEK293), human embryonic kidney 293T (HEK293T), NS0 cells, SP2/0 cells, YO myeloma cells, P3X63 mouse myeloma cells, PER cells, PER.C6 cells, hybridoma cells, NIH3T3 cells, CV-1 (simian) in Origin with SV40 genetic material (COS), HeLa, Chinese hamster ovary (CHO), or yeast cells, or other eukaryotic cells known in the art suitable for the production of recombinant products. Exemplary methods for the creation of expression vectors, the transformation of host cells and the expression and recovery of reference CasX, the CasX variants, or the gNA are described in the Examples.

[0383] The gene encoding the reference CasX, the CasX variants, or the gNA constructs can be made in one or more steps, either fully synthetically or by synthesis combined with enzymatic processes, such as restriction enzyme-mediated cloning, PCR and overlap extension, including methods more fully described in the Examples. The methods disclosed herein can be used, for example, to ligate sequences of polynucleotides encoding the various components (e.g., CasX and gNA) genes of a desired sequence. Genes encoding polypeptide compositions are assembled from oligonucleotides using standard techniques of gene synthesis.

[0384] In some embodiments, the nucleotide sequence encoding a CasX protein or a gNA is codon optimized. This type of optimization can entail a mutation of an encoding nucleotide sequence to mimic the codon preferences of the intended host organism or cell while encoding the same CasX protein or gNA. Thus, the codons can be changed, but the encoded protein or gNA remains unchanged. For example, if the intended target cell of the CasX protein was a human cell, a human codon-optimized CasX-encoding nucleotide sequence could be used. As another non-limiting example, if the intended host cell were a mouse cell, then a mouse codon-optimized CasX-encoding nucleotide sequence could be generated. As another non-limiting example, if the intended host cell were a plant cell, then a plant codon-optimized CasX protein variant-encoding nucleotide sequence could be generated. As another non-limiting example, if the intended host cell were an insect cell, then an insect codon-optimized CasX protein-encoding nucleotide sequence could be generated. The gene design can be performed using algorithms that optimize codon usage and amino acid composition appropriate for the host cell utilized in the production of the reference CasX, the CasX variants, or the gNA. In one method of the disclosure, a library of polynucleotides encoding the components of the constructs is created and then assembled, as described above. The resulting genes are then assembled and the resulting genes used to transform a host cell and produce and recover the reference CasX, the CasX variants, or the gNA compositions for evaluation of its properties, as described herein.

[0385] In some embodiments, a nucleotide sequence encoding a gNA is operably linked to a control element, e.g., a transcriptional control element, such as a promoter. In some embodiments, a nucleotide sequence encoding a CasX protein is operably linked to a control element, e.g., a transcriptional control element, such as a promoter. In other cases, the nucleotide encoding the CasX and gNA are linked and are operably linked to a single control element. In some cases, the promoter is a constitutively active promoter. In some cases, the promoter is a regulatable promoter. In some cases, the promoter is an inducible promoter. In some cases, the promoter is a tissue-specific promoter. In some cases, the promoter is a cell type-specific promoter. In some cases, the transcriptional control element (e.g., the promoter) is functional in a targeted cell type or targeted cell population. For example, in some cases, the transcriptional control element can be functional in eukaryotic cells, e.g., neurons, spinal motor neurons, oligodendrocytes, or glial cells.

[0386] Non-limiting examples of eukaryotic promoters (promoters functional in a eukaryotic cell) include EF1alpha, EF1alpha core promoter, those from cytomegalovirus (CMV) immediate early, herpes simplex virus (HSV) thymidine kinase, early and late SV40, long terminal repeats (LTRs) from retrovirus, and mouse metallothionein-I. Further non-limiting examples of eukaryotic promoters include the CMV promoter full-length promoter, the minimal CMV promoter, the chicken 3-actin promoter, the hPGK promoter, the HSV TK promoter, the Mini-TK promoter, the human synapsin I promoter which confers neuron-specific expression, the Mecp2 promoter for selective expression in neurons, the minimal IL-2 promoter, the Rous sarcoma virus enhancer/promoter (single), the spleen focus-forming virus long terminal repeat (LTR) promoter, the SV40 promoter, the SV40 enhancer and early promoter, the TBG promoter: promoter from the human thyroxine-binding globulin gene (Liver specific), the PGK promoter, the human ubiquitin C promoter, the UCOE promoter (Promoter of HNRPA2B1-CBX3), the Histone H2 promoter, the Histone H3 promoter, the U1a1 small nuclear RNA promoter (226 nt), the U1b2 small nuclear RNA promoter (246 nt) 26, the TTR minimal enhancer/promoter, the b-kinesin promoter, the human eIF4A1 promoter, the ROSA26 promoter and the glyceraldehyde 3-phosphate dehydrogenase (GAPDH) promoter. In some embodiments, the promoter used in the gNA construct is U6 (Kunkel, G R et al. U6 small nuclear RNA is transcribed by RNA polymerase III. Proc Natl Acad Sci USA. 83(22):8575 (1986)).

[0387] Selection of the appropriate vector and promoter is well within the level of ordinary skill in the art, as it related to controlling expression, e.g., for modifying a SOD1 gene. The expression vector may also contain a ribosome binding site for translation initiation and a transcription terminator. The expression vector may also include appropriate sequences for amplifying expression. The expression vector may also include nucleotide sequences encoding protein tags (e.g., 6xHis tag, hemagglutinin tag, fluorescent protein, etc.) that can be fused to the CasX protein, thus resulting in a chimeric CasX protein that are used for purification or detection.

[0388] In some embodiments, a nucleotide sequence encoding a gNA variant and/or a CasX protein is operably linked to an inducible promoter, a constitutively active promoter, a spatially restricted promoter (i.e., transcriptional control element, enhancer, tissue specific promoter, cell type specific promoter, etc.), or a temporally restricted promoter.

[0389] In certain embodiments, suitable promoters can be derived from viruses and can therefore be referred to as viral promoters, or they can be derived from any organism, including prokaryotic or eukaryotic organisms. Suitable promoters can be used to drive expression by any RNA polymerase (e.g., pol I, pol II, pol III). Exemplary promoters include, but are not limited to the SV40 early promoter, mouse mammary tumor virus long terminal repeat (LTR) promoter; adenovirus major late promoter (Ad MLP); a herpes simplex virus (HSV) promoter, a cytomegalovirus (CMV) promoter such as the CMV immediate early promoter region (CMVIE), a rous sarcoma virus (RSV) promoter, a human U6 small nuclear promoter (U6), an enhanced U6 promoter, a human HI promoter (HI), a POL1 promoter, a 7SK promoter, tRNA promoters and the like.

[0390] In some embodiments, a nucleotide sequence encoding a CasX and gNA and, optionally, a donor template, is operably linked to (under the control of) an inducible promoter operable in a eukaryotic cell. Examples of inducible promoters may include, but are not limited to, T7 RNA polymerase promoter, T3 RNA polymerase promoter, isopropyl-beta-D-thiogalactopyranoside (IPTG)-regulated promoter, lactose induced promoter, heat shock promoter, tetracycline-regulated promoter, kanamycin-regulated promoter, steroid-regulated promoter, metal-regulated promoter, estrogen receptor-regulated promoter, etc. Inducible promoters can therefore, in some embodiments, be regulated by molecules including, but not limited to, doxycycline; estrogen and/or an estrogen analog; IPTG; etc. Additional examples of inducible promoters include, without limitation, chemically/biochemically-regulated and physically-regulated promoters such as alcohol-regulated promoters, kanamycin-regulated promoters, tetracycline-regulated promoters (e.g., anhydrotetracycline (aTc)-responsive promoters and other tetracycline-responsive promoter systems, which include a tetracycline repressor protein (tetR), a tetracycline operator sequence (tetO) and a tetracycline transactivator fusion protein (tTA), steroid-regulated promoters (e.g., promoters based on the rat glucocorticoid receptor, human estrogen receptor, moth ecdysone receptors, and promoters from the steroid/retinoid/thyroid receptor superfamily), metal-regulated promoters (e.g., promoters derived from metallothionein (proteins that bind and sequester metal ions) genes from yeast, mouse and human), pathogenesis-regulated promoters (e.g., induced by salicylic acid, ethylene or benzothiadiazole (BTH)), temperature/heat-inducible promoters (e.g., heat shock promoters), and light-regulated promoters (e.g., light responsive promoters from plant cells).

[0391] In some cases, the promoter is a spatially restricted promoter (i.e., cell type specific promoter, tissue specific promoter, etc.) such that in a multi-cellular organism, the promoter is active (i.e., “ON”) in a subset of specific cells. Spatially restricted promoters may also be referred to as enhancers, transcriptional control elements, control sequences, etc. Any convenient spatially restricted promoter may be used as long as the promoter is functional in the targeted host cell (e.g., eukaryotic cell; prokaryotic cell).

[0392] In some cases, the promoter is a reversible promoter. Suitable reversible promoters, including reversible inducible promoters are known in the art. Such reversible promoters may be isolated and derived from many organisms, e.g., eukaryotes and prokaryotes. Modification of reversible promoters derived from a first organism for use in a second organism, e.g., a first prokaryote and a second a eukaryote, a first eukaryote and a second a prokaryote, etc., is well known in the art. Such reversible promoters, and systems based on such reversible promoters but also comprising additional control proteins, include, but are not limited to, alcohol regulated promoters (e.g., alcohol dehydrogenase I (alcA) gene promoter, promoters responsive to alcohol transactivator proteins (AlcR, etc.), tetracycline regulated promoters, (e.g., promoter systems including Tet Activators, TetON, TetOFF, etc.), steroid regulated promoters (e.g., rat glucocorticoid receptor promoter systems, human estrogen receptor promoter systems, retinoid promoter systems, thyroid promoter systems, ecdysone promoter systems, mifepristone promoter systems, etc.), metal regulated promoters (e.g., metallothionein promoter systems, etc.), pathogenesis-related regulated promoters (e.g., salicylic acid regulated promoters, ethylene regulated promoters, benzothiadiazole regulated promoters, etc.), temperature regulated promoters (e.g., heat shock inducible promoters (e.g., HSP-70, HSP-90, soybean heat shock promoter, etc.), light regulated promoters, synthetic inducible promoters, and the like.

[0393] Recombinant expression vectors of the disclosure can also comprise elements that facilitate robust expression of CasX proteins and/or transcription of gNAs of the disclosure. For example, recombinant expression vectors can include one or more of a polyadenylation signal (PolyA), an intronic sequence or a post-transcriptional regulatory element such as a woodchuck hepatitis post-transcriptional regulatory element (WPRE). Exemplary polyA sequences include hGH poly(A) signal (short), HSV TK poly(A) signal, synthetic polyadenylation signals, SV40 poly(A) signal, P-globin poly(A) signal and the like. A person of ordinary skill in the art will be able to select suitable elements to include in the recombinant expression vectors described herein.

[0394] The polynucleotides encoding the reference CasX, the CasX variants, or the gNA sequences can then be individually cloned into an expression vector. Vectors include bacterial plasmids, viral vectors, and the like. In some embodiments, the vector is a recombinant expression vector that comprises a nucleotide sequence encoding a CasX protein. In other embodiments, the disclosure provides a recombinant expression vector comprising a nucleotide sequence encoding a CasX protein and a nucleotide sequence encoding a gNA. In some cases, the nucleotide sequence encoding the CasX protein variant and/or the nucleotide sequence encoding the gNA are operably linked to a promoter that is operable in a cell type of choice. In other embodiments, the nucleotide sequence encoding the CasX protein variant and the nucleotide sequence encoding the gNA are provided in separate vectors.

[0395] In some embodiments, provided herein are one or more recombinant expression vectors comprising: (i) a nucleotide sequence of a donor template nucleic acid where the donor template comprises a nucleotide sequence having homology to a SOD1 sequence of a target nucleic acid (e.g., a target genome); (ii) a nucleotide sequence that encodes a gNA (e.g., gRNA), that hybridizes to a sequence of the target SOD1 locus of the targeted genome (e.g., configured as a single or dual guide RNA) operably linked to a promoter that is operable in a target cell such as a eukaryotic cell; and (iii) a nucleotide sequence encoding a CasX protein operably linked to a promoter that is operable in a target cell such as a eukaryotic cell. In some embodiments, the sequences comprising the donor template and encoding the gNA and the CasX proteins are in different recombinant expression vectors, and in other embodiments one or more or all three polynucleotide sequences (for the donor template, CasX and gNA) are in the same recombinant expression vector.

[0396] The nucleic acid sequence is inserted into the vector by a variety of procedures. In general, DNA is inserted into an appropriate restriction endonuclease site(s) using techniques known in the art. Vector components generally include, but are not limited to, one or more of a signal sequence, an origin of replication, one or more marker genes, an enhancer element, a promoter, and a transcription termination sequence. Construction of suitable vectors containing one or more of these components employs standard ligation techniques which are known to the skilled artisan. Such techniques are well known in the art and well described in the scientific and patent literature. Various vectors are publicly available. The vector may, for example, be in the form of a plasmid, cosmid, viral particle, or phage that may conveniently be subjected to recombinant DNA procedures, and the choice of vector will often depend on the host cell into which it is to be introduced. Thus, the vector may be an autonomously replicating vector, i.e., a vector, which exists as an extrachromosomal entity, the replication of which is independent of chromosomal replication, e.g., a plasmid. Alternatively, the vector may be one which, when introduced into a host cell, is integrated into the host cell genome and replicated together with the chromosome(s) into which it has been integrated. Once introduced into a suitable host cell, expression of the SOD1 can be determined using any nucleic acid or protein assay known in the art. For example, the presence of transcribed mRNA of reference CasX or the CasX variants can be detected and/or quantified by conventional hybridization assays (e.g., Northern blot analysis), amplification procedures (e.g. RT-PCR), SAGE (U.S. Pat. No. 5,695,937), and array-based technologies (see e.g., U.S. Pat. Nos. 5,405,783, 5,412,087 and 5,445,934), using probes complementary to any region of SOD1 polynucleotide.

[0397] The disclosure provides for the use of plasmid expression vectors containing replication and control sequences that are compatible with and recognized by the host cell and are operably linked to the gene encoding the polypeptide for controlled expression of the polypeptide or transcription of the RNA. Such vector sequences are well known for a variety of bacteria, yeast, and viruses. Useful expression vectors that can be used include, for example, segments of chromosomal, non-chromosomal and synthetic DNA sequences. “Expression vector” refers to a DNA construct containing a DNA sequence that is operably linked to a suitable control sequence capable of effecting the expression of the DNA encoding the polypeptide in a suitable host. The requirements are that the vectors are replicable and viable in the host cell of choice. Low- or high-copy number vectors may be used as desired. The control sequences of the vector include a promoter to effect transcription, an optional operator sequence to control such transcription, a sequence encoding suitable mRNA ribosome binding sites, and sequences that control termination of transcription and translation. The promoter may be any DNA sequence, which shows transcriptional activity in the host cell of choice and may be derived from genes encoding proteins either homologous or heterologous to the host cell.

[0398] The recombinant expression vectors can be delivered to the target host cells by a variety of methods, as described more fully, below. Such methods include e.g., viral infection, transfection, lipofection, electroporation, calcium phosphate precipitation, polyethyleneimine (PEI)-mediated transfection, DEAE-dextran mediated transfection, liposome-mediated transfection, particle gun technology, nucleofection, electroporation, direct addition by cell penetrating CasX proteins that are fused to or recruit donor DNA, cell squeezing, calcium phosphate precipitation, direct microinjection, nanoparticle-mediated nucleic acid delivery, and the like.

[0399] A recombinant expression vector sequence can be packaged into a virus or virus-like particle (also referred to herein as a “particle”, or “virion”) for subsequent infection and transformation of a cell, ex vivo, in vitro or in vivo. Such particles or virions will typically include proteins that encapsidate or package the vector genome. Suitable expression vectors may include viral expression vectors based on vaccinia virus; poliovirus; adenovirus; a retroviral vector (e.g., Murine Leukemia Virus), spleen necrosis virus, and vectors derived from retroviruses such as Rous Sarcoma Virus, Harvey Sarcoma Virus, avian leukosis virus, a lentivirus, human immunodeficiency virus, myeloproliferative sarcoma virus, and mammary tumor virus; and the like. In some embodiments, a recombinant expression vector of the present disclosure is a recombinant adeno-associated virus (AAV) vector. In some embodiments, a recombinant expression vector of the present disclosure is a recombinant lentivirus vector. In some embodiments, a recombinant expression vector of the present disclosure is a recombinant retroviral vector.

[0400] AAV is a small (20 nm), nonpathogenic virus that is useful in treating human diseases in situations that employ a viral vector for delivery to a cell such as a eukaryotic cell, either in vivo or ex vivo for cells to be prepared for administration to a subject. A construct is generated, for example a construct encoding any of the CasX protein and/or gNA embodiments as described herein, and is flanked with AAV inverted terminal repeat (ITR) sequences, thereby enabling packaging of the AAV vector into an AAV viral particle.

[0401] An “AAV” vector may refer to the naturally occurring wild-type virus itself or derivatives thereof. The term covers all subtypes, serotypes and pseudotypes, and both naturally occurring and recombinant forms, except where required otherwise. As used herein, the term “serotype” refers to an AAV which is identified by and distinguished from other AAVs based on capsid protein reactivity with defined antisera, e.g., there are many known serotypes of primate AAVs. In some embodiments, the AAV vector is selected from AAV1, AAV2, AAV3, AAV4, AAV5, AAV6, AAV7, AAV8, AAV9, AAV 10, AAV-Rh74 (Rhesus macaque-derived AAV), and AAVRh10, and modified capsids of these serotypes. For example, serotype AAV-2 is used to refer to an AAV which contains capsid proteins encoded from the cap gene of AAV-2 and a genome containing 5′ and 3′ ITR sequences from the same AAV-2 serotype. Pseudotyped AAV refers to an AAV that contains capsid proteins from one serotype and a viral genome including 5′-3′ ITRs of a second serotype. Pseudotyped rAAV would be expected to have cell surface binding properties of the capsid serotype and genetic properties consistent with the ITR serotype. Pseudotyped recombinant AAV (rAAV) are produced using standard techniques described in the art. As used herein, for example, rAAV1 may be used to refer an AAV having both capsid proteins and 5′-3′ ITRs from the same serotype or it may refer to an AAV having capsid proteins from serotype 1 and 5′-3′ ITRs from a different AAV serotype, e.g., AAV serotype 2. For each example illustrated herein the description of the vector design and production describes the serotype of the capsid and 5′-3′ ITR sequences.

[0402] An “AAV virus” or “AAV viral particle” refers to a viral particle composed of at least one AAV capsid protein (preferably by all of the capsid proteins of a wild-type AAV) and an encapsidated polynucleotide. If the particle additionally comprises a heterologous polynucleotide (i.e., a polynucleotide other than a wild-type AAV genome to be delivered to a mammalian cell), it is typically referred to as “rAAV”. An exemplary heterologous polynucleotide is a polynucleotide comprising a CasX protein and/or sgRNA and, optionally, a donor template of any of the embodiments described herein.

[0403] By “adeno-associated virus inverted terminal repeats” or “AAV ITRs” is meant the art recognized regions found at each end of the AAV genome which function together in cis as origins of DNA replication and as packaging signals for the virus. AAV ITRs, together with the AAV rep coding region, provide for the efficient excision and rescue from, and integration of a nucleotide sequence interposed between two flanking ITRs into a mammalian cell genome.

[0404] The nucleotide sequences of AAV ITR regions are known. See, for example Kotin, R. M. (1994) Human Gene Therapy 5:793-801; Berns, K. I. “Parvoviridae and their Replication” in Fundamental Virology, 2^{nd} Edition, (B. N. Fields and D. M. Knipe, eds.). As used herein, an AAV ITR need not have the wild-type nucleotide sequence depicted, but may be altered, e.g., by the insertion, deletion or substitution of nucleotides. Additionally, the AAV ITR may be derived from any of several AAV serotypes, including without limitation, AAV1, AAV2, AAV3, AAV4, AAV5, AAV6, AAV7, AAV8, AAV9, AAV10, AAV-Rh74, and AAVRh10, and modified capsids of these serotypes. Furthermore, 5′ and 3′ ITRs which flank a selected nucleotide sequence in an AAV vector need not necessarily be identical or derived from the same AAV serotype or isolate, so long as they function as intended, i.e., to allow for excision and rescue of the sequence of interest from a host cell genome or vector, and to allow integration of the heterologous sequence into the recipient cell genome when AAV Rep gene products are present in the cell. Use of AAV serotypes for integration of heterologous sequences into a host cell is known in the art (see, e.g., WO2018195555A1 and US20180258424A1, incorporated by reference herein.)

[0405] By “AAV rep coding region” is meant the region of the AAV genome which encodes the replication proteins Rep 78, Rep 68, Rep 52 and Rep 40. These Rep expression products have been shown to possess many functions, including recognition, binding and nicking of the AAV origin of DNA replication, DNA helicase activity and modulation of transcription from AAV (or other heterologous) promoters. The Rep expression products are collectively required for replicating the AAV genome.

[0406] By “AAV cap coding region” is meant the region of the AAV genome which encodes the capsid proteins VP1, VP2, and VP3, or functional homologues thereof. These Cap expression products supply the packaging functions which are collectively required for packaging the viral genome.

[0407] In some embodiments, AAV capsids utilized for delivery of the encoding sequences for the CasX and gNA, and, optionally, the SOD1 donor template nucleotides to a host cell can be derived from any of several AAV serotypes, including without limitation, AAV1, AAV2, AAV3, AAV4, AAV5, AAV6, AAV7, AAV8, AAV9, AAV10, AAV-Rh74 (Rhesus macaque-derived AAV), and AAVRh10, and the AAV ITRs are derived from AAV serotype 2.

[0408] In order to produce rAAV viral particles, an AAV expression vector is introduced into a suitable host cell using known techniques, such as by transfection. Packaging cells are typically used to form virus particles; such cells include HEK293 cells (and other cells known in the art), which package adenovirus. A number of transfection techniques are generally known in the art; see, e.g., Sambrook et al. (1989) Molecular Cloning, a laboratory manual, Cold Spring Harbor Laboratories, New York. Particularly suitable transfection methods include calcium phosphate co-precipitation, direct microinjection into cultured cells, electroporation, liposome mediated gene transfer, lipid-mediated transduction, and nucleic acid delivery using high-velocity microprojectiles.

[0409] In some embodiments, host cells transfected with the above-described AAV expression vectors are rendered capable of providing AAV helper functions in order to replicate and encapsidate the nucleotide sequences flanked by the AAV ITRs to produce rAAV viral particles. AAV helper functions are generally AAV-derived coding sequences which can be expressed to provide AAV gene products that, in turn, function in trans for productive AAV replication. AAV helper functions are used herein to complement necessary AAV functions that are missing from the AAV expression vectors. Thus, AAV helper functions include one, or both of the major AAV ORFs (open reading frames), encoding the rep and cap coding regions, or functional homologues thereof. Accessory functions can be introduced into and then expressed in host cells using methods known to those of skill in the art. Commonly, accessory functions are provided by infection of the host cells with an unrelated helper virus. In some embodiments, accessory functions are provided using an accessory function vector. Depending on the host/vector system utilized, any of a number of suitable transcription and translation control elements, including constitutive and inducible promoters, transcription enhancer elements, transcription terminators, etc., may be used in the expression vector.

[0410] In other embodiments, suitable vectors may include virus-like particles (VLP). Virus-like particles (VLPs) are particles that closely resemble viruses, but do not contain viral genetic material and are therefore non-infectious. In some embodiments, VLPs comprise a polynucleotide encoding a transgene of interest, for example any of the CasX protein and/or a gNA embodiments, and, optionally, SOD1 donor template polynucleotides, described herein, packaged with one or more viral structural proteins. In other embodiments, the VLP comprise a CasX and gNA complexed as an RNP and, optionally, a donor template comprising all or a portion of the SOD1 gene to either knock-down/knock-out the SOD1 gene or a portion of the gene to correct the one or more mutations of the SOD1 gene by insertion via HDR or HITI mechanisms.

[0411] In other embodiments, the disclosure provides VLPs produced in vitro that comprise a CasX:gNA RNP complex of the CasX and gNA of any of the embodiments described herein and, optionally, a donor template. Combinations of structural proteins from different viruses can be used to create VLPs, including components from virus families including Parvoviridae (e.g., adeno-associated virus), Retroviridae (e.g., HIV), Flaviviridae (e.g., Hepatitis C virus), Paramyxoviridae (e.g., Nipah) and bacteriophages (e.g., Qβ, AP205). In some embodiments, the disclosure provides VLP systems designed using components of retrovirus, including lentiviruses such as HIV, in which individual plasmids comprising nucleic acids encoding the various components are introduced into a packaging cell that, in turn, produce the VLP. In some embodiments, the disclosure provides VLP having an HIV capsid that contains a CasX:gNA RNP wherein upon administration and entry into a target cell, the RNP molecule is free to be transported into the nucleus of the cell. The foregoing offers advantages over other vectors in the art in that viral transduction to dividing and non-dividing cells is efficient and that the VLP delivers potent and short-lived RNP that escape a subject's immune surveillance mechanisms that would otherwise detect a foreign protein. In some embodiments, a system to make VLP in a host cell comprises nucleic acids encoding one or more components selected from i) a gag polyprotein or portions thereof; ii) a CasX protein of any of the embodiments described herein; iii) a protease cleavage site; iv) a protease; v) a gNA of any of the embodiments described herein (including the targeting sequence); vi) a pol polyprotein or portions thereof; and vii) a pseudotyping glycoprotein or antibody fragment that provides for binding and fusion of the VLP to a target cell. The envelope protein or glycoprotein can be derived from any enveloped viruses known in the art to confer tropism to VLP, including but not limited to the group consisting of Argentine hemorrhagic fever virus, Australian bat virus, Autographa californica multiple nucleopolyhedrovirus, Avian leukosis virus, baboon endogenous virus, Bolivian hemorrhagic fever virus, Borna disease virus, Breda virus, Bunyamwera virus, Chandipura virus, Chikungunya virus, Crimean-Congo hemorrhagic fever virus, Dengue fever virus, Duvenhage virus, Eastern equine encephalitis virus, Ebola hemorrhagic fever virus, Ebola Zaire virus, enteric adenovirus, Ephemerovirus, Epstein-Bar virus (EBV), European bat virus 1, European bat virus 2, Fug Synthetic gP Fusion, Gibbon ape leukemia virus, Hantavirus, Hendra virus, hepatitis A virus, hepatitis B virus, hepatitis C virus, hepatitis D virus, hepatitis E virus, hepatitis G Virus (GB virus C), herpes simplex virus type 1, herpes simplex virus type 2, human cytomegalovirus (HHV5), human foamy virus, human herpesvirus (HHV), human Herpesvirus 7, human herpesvirus type 6, human herpesvirus type 8, human immunodeficiency virus 1 (HIV-1), human metapneumovirus, human T-lymphotro pic virus 1, influenza A, influenza B, influenza C virus, Japanese encephalitis virus, Kaposi's sarcoma-associated herpesvirus (HHV8), Kaysanur Forest disease virus, La Crosse virus, Lagos bat virus, Lassa fever virus, lymphocytic choriomeningitis virus (LCMV), Machupo virus, Marburg hemorrhagic fever virus, measles virus, Middle eastern respiratory syndrome-related coronavirus, Mokola virus, Moloney murine leukemia virus, monkey pox, mouse mammary tumor virus, mumps virus, murine gammaherpesvirus, Newcastle disease virus, Nipah virus, Nipah virus, Norwalk virus, Omsk hemorrhagic fever virus, papilloma virus, parvovirus, pseudorabies virus, Quaranfil virus, rabies virus, RD114 Endogenous Feline Retrovirus, respiratory syncytial virus (RSV), Rift Valley fever virus, Ross River virus, rRotavirus, Rous sarcoma virus, rubella virus, Sabia-associated hemorrhagic fever virus, SARS-associated coronavirus (SARS-CoV), Sendai virus, Tacaribe virus, Thogotovirus, tick-borne encephalitis causing virus, varicella zoster virus (HHV3), varicella zoster virus (HHV3), variola major virus, variola minor virus, Venezuelan equine encephalitis virus, Venezuelan hemorrhagic fever virus, vesicular stomatitis virus (VSV), VSV-G, Vesiculovirus, West Nile virus, western equine encephalitis virus, and Zika Virus. In some embodiments, the packaging cell used for the production of VLP is selected from the group consisting of HEK293 cells, Lenti-X 293T cells, BHK cells, HepG2 cells, Saos-2 cells, HuH7 cells, NS0 cells, SP2/0 cells, YO myeloma cells, A549 cells, P3X63 mouse myeloma cells, PER cells, PER.C6 cells, hybridoma cells, VERO cells, NIH3T3 cells, COS cells, W138 cells, MRC5 cells, A549 cells, HeLa cells, CHO cells, or HT1080 cells.

[0412] VII. Cells

[0413] In still another aspect, provided herein are populations of cells comprising a wild-type or a modified SOD1 gene modified by any of the CasX:gNA system or method embodiments described herein. Cells that have been genetically modified in this way may be administered to a subject for purposes such as gene therapy, e.g., to treat a disease associated with a defect in the SOD1 gene.

[0414] In some embodiments, the disclosure provides populations of cells modified by introducing into each cell of the population: a) a CasX:gNA system of any of the embodiments described herein; b) nucleic acid encoding a CasX:gNA system of any of the embodiments described herein; c) a vector comprising the nucleic acid of (b); d) a VLP comprising a CasX:gNA system of (a); or e) combinations of two or more of (a)-(d), wherein the SOD1 target nucleic acid sequence of the cells is modified by the CasX protein. In some embodiments, the disclosure provides a population of cells wherein the cells have been modified such that at least 70%, at least 75%, at least 80%, at least 85%, at least 90%, or at least 95% of the modified cells do not express a detectable level of SOD1 protein. In other embodiments, the disclosure provides a population of cells wherein the cells have been modified such that the expression of SOD1 protein is reduced by at least 70%, at least 75%, at least 80%, at least 85%, at least 90%, or at least 95% compared to cells that have not been modified. In still other embodiments, the disclosure provides a population of cells wherein the mutation of the SOD1 gene is corrected in the modified cells of the population, resulting in expression of a functional SOD1 protein by the modified cells. The effects of the modification can be assessed by ELISA assays, the assays of the examples, or conventional assays known in the art.

[0415] In those cases where the CasX is delivered to the cells in the protein form and the gNA is delivered in the RNA form, the CasX and gNA can be pre-complexed and delivered as an RNP. In some embodiments, the targeting sequence of the gNA used to target the SOD1 gene of the cells is selected from a sequence of Table 3, or a sequence having at least about 65%, at least about 75%, at least about 85%, or at least about 95% identity thereto. Upon hybridization with the target nucleic acid by the CasX and the gNA, the CasX introduces one or more single-strand breaks or double-strand breaks within or near the SOD1 gene that results in a modification of the target nucleic acid such as a permanent indel (deletion or insertion) or a mutation in the target nucleic acid that, in connection with the repair mechanisms of the host cell, result in a correction or a compensation of the mutation, with a corresponding expression of functional SOD1 protein, thereby creating the modified population of cells. In other embodiments, the target nucleic acid of the cells is modified using a plurality of gNAs (e.g., two, three, four or more) targeted to different or overlapping portions of the SOD1 gene wherein the CasX protein introduces multiple breaks in the target nucleic acid sequence that result in a permanent indel (deletion or insertion) or corrective mutation. In some embodiments, the disclosure provides populations of cells modified by contacting the SOD1 gene with a CasX, one or more gNA, and a donor template comprising a corrective sequence, wherein the donor template sequence is flanked by an upstream sequence and a downstream sequence with homology adjacent to the break sites in the target nucleic acid, facilitating insertion of the donor template sequence in order to correct the mutation(s) in the population of cells. In one embodiment, the disclosure provides populations of cells that have been modified to express the SOD1 protein of SEQ ID NO: 100. The donor template can be a short single-stranded or double-stranded oligonucleotide, or can be a long single-stranded or double-stranded oligonucleotide. The insertion of the donor template at the target region which can be mediated by homology-directed repair (HDR) or homology-independent targeted integration (HITI). The exogenous sequence inserted by HITI can be any length, for example, a relatively short sequence of between 1 and 50 nucleotides in length, or a longer sequence of about 50-1000 nucleotides in length. The donor template sequence may comprise certain sequence differences as compared to the genomic sequence, e.g., restriction sites, nucleotide polymorphisms, barcodes, selectable markers (e.g., drug resistance genes, fluorescent proteins, enzymes etc.), etc., which may be used to assess for successful insertion of the donor nucleic acid at the cleavage site or, in some cases, may be used for other purposes (e.g., to signify expression at the targeted genomic locus). Alternatively, these sequence differences may include flanking recombination sequences such as FLPs, loxP sequences, or the like, that can be activated at a later time for removal of the marker sequence.

[0416] A cell that can serve as a recipient for a CasX variant protein and/or gNA of the present disclosure and/or a nucleic acid comprising a nucleotide sequence encoding a CasX variant protein and/or a gNA variant and, optionally, a donor template, can be any of a variety of cells, including, e.g., in vitro cells; in vivo cells; ex vivo cells; primary cells; cancer cells; animal cells; etc. A cell can be a recipient of a CasX RNP of the present disclosure. A cell can be a recipient of a single component of a CasX system of the present disclosure. In certain embodiments, as provided herein, a cell can be an in vitro cell (e.g., established cultured cell line including, but not limited to HEK293 cells, BHK cells, NS0 cells, SP2/0 cells, YO myeloma cells, P3X63 mouse myeloma cells, PER cells, PER.C6 cells, hybridoma cells, NIH3T3 cells, COS, HeLa, or CHO cells). A cell can be an ex vivo cell (cultured cell from an individual). A cell can be an in vivo cell (e.g., a cell in an individual). A cell can be an isolated cell. A cell can be a cell in a cell culture (e.g., in vitro cell culture). A cell can be one of a collection of cells. A cell can be a eukaryotic cell or derived from a eukaryotic cell. A cell can be an animal cell or derived from an animal cell. A cell can be a mammalian cell or derived from a mammalian cell. A cell can be a rodent cell or derived from a rodent cell. A cell can be a non-human primate cell or derived from a non-human primate cell. A cell can be a human cell or derived from a human cell. A cell can be autologous with respect to the subject to be administered the cells. A cell can be allogenic with respect to the subject to be administered the cells.

[0417] The populations of modified cells have utility in the treatment of a SOD1-related disorder, including administration of the population of cells to a subject having a SOD1-related disorder such as ALS. In other embodiments, the disclosure provides populations of modified cells for use in methods to provide functional SOD1 in a subject. In some cases, the modified cell is a cell of the central nervous system (CNS) or peripheral nervous system (PNS). In some embodiments, the modified cell is a neuron. In some embodiments, the modified cell is a spinal motor neuron. In other cases, the modified cell is a glial cell, an oligodendrocyte, or a Schwann cell. In some embodiments, the populations of modified cells are eukaryotic, which can include rodent cells, mouse cells, rat cells, primate cells, non-human primate cells, human cells, embryonic stem (ES) cells, or induced pluripotent stem cells (iPSC). In some embodiments, the population of cells are autologous with respect to the subject to be administered the cells. In other embodiments, the population of cells are allogenic with respect to the subject to be administered the cells. Thus, the CasX:gNA systems and methods described herein can be used to modify a variety of cells in which mutations in SOD1 are associated with disease, e.g., stem cells, cells of the central nervous system (CNS) or peripheral nervous system (PNS), to produce a cell in which the SOD1 comprising mutations is corrected. This approach, therefore, could be used for methods of treatment in a subject with a disease such as ALS.

[0418] VIII. Applications

[0419] The CasX:gNA systems comprising CasX proteins, guides, and variants thereof provided herein are useful in methods for modifying SOD1 target nucleic acid in various applications, including therapeutics, diagnostics, and research.

[0420] In the methods of modifying a SOD1 target nucleic acid, the method utilizes any of the embodiments of the CasX:gNA system described herein, and optionally include a donor template described herein. In some embodiments, the method results in reducing or eliminating expression of the mutant allele at the protein level by introduction of a mutation in the mutant allele in the SOD1 gene by an insertion, substitution or deletion resulting from cleavage of the SOD1 gene by the CasX:gNA system followed by non-homologous end joining (NHEJ), micro-homology mediated end joining (MMEJ), single strand annealing (SSA), base excision repair (BER), or other repair mechanisms. In other embodiments, the method results in correction of the mutation in the SOD1 gene by cleavage of the SOD1 gene by the CasX:gNA system followed by insertion of corrective nucleotides by homology-directed repair (HDR), homology-independent targeted integration (HITI), or other repair mechanisms, resulting in the expression of functional SOD1 protein. In other embodiments, the method results in correction of the mutation in the SOD1 gene by cleavage of the SOD1 gene by the CasX:gNA system followed by insertion, or knocking-in, SOD1 cDNA into the SOD1 gene locus using a donor template, resulting in the expression of functional SOD1 protein.

[0421] In some embodiments, the method comprises contacting the target nucleic acid with a CasX protein and a guide nucleic acid (gNA) comprising a targeting sequence wherein said contacting results in modification of the target nucleic acid by the CasX protein.

[0422] In some embodiments, the method comprises introducing into a cell the CasX protein or a nucleic acid encoding the CasX protein and the gNA or the nucleic acid encoding the gNA, wherein the target nucleic acid sequence comprises a SOD1 gene and wherein the targeting sequence comprises a sequence complementary to a portion of the SOD1 gene at or near the mutation wherein the contacting results in the modification of the SOD1 gene.

[0423] In some embodiments, the method comprises introducing into a cell the CasX protein or a nucleic acid encoding the CasX protein and the gNA or the nucleic acid encoding the gNA, wherein the target nucleic acid comprises a superoxide dismutase 1 (SOD1) gene and wherein the targeting sequence comprises a sequence complementary to a portion of the SOD1 gene, wherein the contacting results in the modification of the SOD1 gene. In some embodiments, the targeting sequence of the gNA comprises a sequence of Table 3, or a sequence having at least about 65%, at least about 75%, at least about 85%, or at least about 95% identity to a sequence selected from the group consisting of sequences set forth in Table 3. In some embodiments, the scaffold of the gNA comprises a sequence of SEQ ID NOS: 4, 5 or 2101-2241, or a sequence having at least about 50%, at least about 60%, at least about 70%, at least about 80%, at least about 90%, at least about 95%, at least about 95%, at least about 96%, at least about 97%, at least about 98%, at least about 99% sequence identity thereto. In some embodiments, the CasX protein is a CasX variant protein of any of the embodiments described herein, or a reference CasX protein SEQ ID NO: 1, SEQ ID NO: 2, or SEQ ID NO: 3.

[0424] In some embodiments of the method of modifying a SOD1 target nucleic acid, the target nucleic acid comprises a superoxide dismutase 1 (SOD1) gene having one or more mutations, and the targeting sequence of the gNA has a sequence that is complementary to, and therefore can hybridize with the SOD1 gene. In some cases, the SOD1 gene has a wild-type nucleic acid sequence. In other embodiments, the method comprises contacting the target nucleic acid with a plurality (e.g., two or more) of gNAs targeted to different or overlapping regions of the SOD1 gene with one or more mutations. In some embodiments of the method, the target nucleic acid is a DNA. In some embodiments of the method, the target nucleic acid is an RNA. In some embodiments, the gNA is a guide RNA (gRNA). In some embodiments, the gNA is a guide DNA (gDNA). In some embodiments, the gNA is a single-molecule gNA (sgNA). In other embodiments, the gNA is a dual-molecule gNA (dgNA). In some embodiments, the gNA is a chimeric gRNA-gDNA. In some embodiments, the method comprises contacting the target nucleic acid with a pre-complexed CasX protein-gNA (i.e., an RNP). In some embodiments, the SOD1 gene comprise a mutation and the modifying comprises introducing a single-stranded break in the target nucleic acid. In other embodiments, the SOD1 gene comprise a mutation and the modifying comprises introducing a double-stranded break in the target nucleic acid. In the foregoing, the resulting modification can be an insertion, deletion, substitution, duplication, or inversion of one or more nucleotides as compared to the wild-type sequence. In some embodiments, the modification corrects a gain of function mutation. In other embodiments, the modification corrects a loss of function mutation. The mutations to be modified can be one or more mutations that disrupt the function of the SOD1 protein, including the mutations of Table 1 or mutations of the SOD1 regulatory element.

[0425] In some embodiments, the method of modifying a target nucleic acid comprises contacting a SOD1 gene with a CasX protein and gNA pair and a donor template comprising a corrective sequence that can be inserted or knocked-in at the break site introduced by the CasX. For example, an exogenous donor template which may comprise a corrective sequence (or a deletion or insertion to knock-out the defective sequence) to be integrated is flanked by an upstream sequence and a downstream sequence with homology to the target nucleic acid to facilitate its introduction into a cell. In some embodiments, the donor template ranges in size from 10-10,000 nucleotides. In other embodiments, the donor template ranges in size from 100-1,000 nucleotides. In some embodiments, the donor template is a single-stranded DNA template or a single stranded RNA template. In other embodiments, the donor template is a double-stranded DNA template.

[0426] In some embodiments of the method, the CasX is a catalytically inactive CasX (dCasX) protein that retains the ability to bind to the gNA and the target nucleic acid sequence comprising the mutation, thereby interfering with transcription of mutant SOD1. In some embodiments, the method comprises contacting a SOD1 gene with a CasX protein and gNA and does not comprise contacting the target nucleic acid with a donor template polynucleotide, and the target nucleic acid is cleaved by the CasX nuclease and is modified such that nucleotides within the target nucleic acid are deleted or inserted according to the cells own repair pathways. In some embodiments, the editing occurs in vitro, inside of a cell, for example in a cell culture system. In some embodiments, the editing occurs in vivo inside of a cell, for example in a cell in an organism or subject. In some embodiments, the editing occurs ex vivo inside of a cell. In some embodiments, the cell is a eukaryotic cell. Exemplary eukaryotic cells may include cells selected from the group consisting of a plant cell, a fungal cell, a mammalian cell, a reptile cell, an insect cell, an avian cell, a fish cell, a parasite cell, an arthropod cell, a cell of an invertebrate, a cell of a vertebrate, a rodent cell, a mouse cell, a rat cell, a primate cell, a non-human primate cell, and a human cell. In some embodiments, the cell is a human cell. In some embodiments, the cell is a non-human primate cell. In some embodiments of the method, the cell is a cell of a central nervous system (CNS) or peripheral nervous system (PNS). In some embodiments, the cell is a neuron. In other embodiments, the neuron is a spinal motor neuron. In other embodiments, the cell is a glial cell, an oligodendrocyte, or a Schwann cell.

[0427] Methods of introducing a nucleic acid (e.g., a nucleic acid comprising a donor polynucleotide sequence, one or more nucleic acids encoding a CasX protein and/or gNA) into a cell are known in the art, and any convenient method can be used to introduce a nucleic acid (e.g., an expression construct) into a cell. Suitable methods include e.g., viral infection, transfection, lipofection, electroporation, calcium phosphate precipitation, polyethyleneimine (PEI)-mediated transfection, DEAE-dextran mediated transfection, liposome-mediated transfection, particle gun technology, nucleofection, electroporation, direct addition by cell penetrating CasX proteins that are fused to or recruit donor DNA, cell squeezing, calcium phosphate precipitation, direct microinjection, nanoparticle-mediated nucleic acid delivery, and the commercially available TransMessenger® reagents from Qiagen, Stemfect™ RNA Transfection Kit from Stemgent, the TransIT®-mRNA Transfection Kit from Mirus Bio LLC, Lonza nucleofection, or Maxagen electroporation and the like. Introducing recombinant expression vectors into cells under in vitro conditions can occur in any suitable culture media and under any suitable culture conditions that promote the survival of the cells. Introducing recombinant expression vectors into a target cell can be carried out in vivo, or in vitro.

[0428] Retroviruses, for example, lentiviruses, may be suitable for use in methods of the present disclosure. Commonly used retroviral vectors are “defective”, e.g., are unable to produce viral proteins required for productive infection. Rather, replication of the vector requires growth in a packaging cell line. To generate viral particles comprising nucleic acids of interest, the retroviral nucleic acids comprising the nucleic acid are packaged into viral capsids by a packaging cell line. Different packaging cell lines provide a different envelope protein (ecotropic, amphotropic or xenotropic) to be incorporated into the capsid, and this envelope protein determines the specificity of the viral particle for the cells (ecotropic for murine and rat; amphotropic for most mammalian cell types including human, dog and mouse; and xenotropic for most mammalian cell types except murine cells). The appropriate packaging cell line may be used to ensure that the cells are targeted by the packaged viral particles. Methods of introducing subject vector expression vectors into packaging cell lines and of collecting the viral particles that are generated by the packaging lines are well known in the art, including U.S. Pat. No. 5,173,414; Tratschin et al., Mol. Cell. Biol. 5:3251-3260 (1985); Tratschin, et al., Mol. Cell. Biol. 4:2072-2081 (1984); Hermonat & Muzyczka, PNAS 81:6466-6470 (1984); and Samulski et al., J. Virol. 63:03822-3828 (1989). Nucleic acids can also be introduced by direct micro-injection (e.g., injection of RNA).

[0429] In other embodiments, the disclosure relates to methods to produce CasX proteins and nucleic acids encoding the CasX compositions of any of the embodiments described herein, or sequences complementary to the polynucleotide sequences, including homologous variants thereof, as well as methods to express the CasX proteins expressed by the polynucleotide sequences. A CasX protein of the present disclosure may be produced in vitro or by eukaryotic cells or by prokaryotic cells. For production by host cells, in general, the methods include producing a polynucleotide sequence coding for the CasX proteins of any of the embodiments described herein and incorporating the encoding gene into an expression vector appropriate for a host cell. For production of the encoded CasX proteins of any of the embodiments described herein, the method includes transforming an appropriate host cell with an expression vector, and culturing the host cell under conditions causing or permitting the resulting CasX protein to be expressed in the transformed host cell, thereby producing the CasX protein, which is recovered by methods described herein or by standard protein purification methods known in the art. Standard recombinant techniques in molecular biology are used to make the polynucleotides and expression vectors of the present disclosure.

[0430] In some embodiments of the method of altering a SOD1 target nucleic acid of a cell, to induce cleavage or any desired modification to a target nucleic acid (e.g., genomic DNA), or any desired modification to a polypeptide associated with the target SOD1 gene, the gNA and/or the CasX protein of the present disclosure and/or the donor template sequence, whether they be introduced as nucleic acids or polypeptides, are provided to the cells for about 30 minutes to about 24 hours, or at least about 1 hour, 1.5 hours, 2 hours, 2.5 hours, 3 hours, 3.5 hours 4 hours, 5 hours, 6 hours, 7 hours, 8 hours, 12 hours, 16 hours, 18 hours, 20 hours, or any other period from about 30 minutes to about 24 hours, which may be repeated with a frequency of about every day to about every 4 days, e.g., every 1.5 days, every 2 days, every 3 days, or any other frequency from about every day to about every four days. The agent(s) may be provided to the subject cells one or more times, e.g., one time, twice, three times, or more than three times, and the cells allowed to incubate with the agent(s) for some amount of time following each contacting event e.g., 30 minutes to about 24 hours. In the case of in vitro-based methods, after the incubation period with the CasX and gNA (and optionally the donor template), the media is replaced with fresh media and the cells are cultured further.

[0431] In embodiments in which two or more different targeting complexes are provided to the cell (e.g., two gNAs comprising two or more different targeting sequences that are complementary to different or overlapping sequences within the same or different regions of the SOD1 gene and/or targeting region), the complexes may be provided simultaneously (e.g., as two polypeptides and/or nucleic acids), or delivered simultaneously. Alternatively, they may be provided consecutively, e.g., the targeting complex being provided first, followed by the second targeting complex, etc. or vice versa.

[0432] To improve the delivery of a DNA vector into a target cell, the DNA can be protected from damage and its entry into the cell facilitated, for example, by using lipoplexes and polyplexes. Thus, in some cases, a nucleic acid of the present disclosure (e.g., a recombinant expression vector of the present disclosure) can be covered with lipids in an organized structure like a micelle or a liposome. When the organized structure is complexed with DNA it is called a lipoplex. There are three types of lipids, anionic (negatively-charged), neutral, or cationic (positively-charged). Lipoplexes that utilize cationic lipids have proven utility for gene transfer. Cationic lipids, due to their positive charge, naturally complex with the negatively charged DNA. Also, as a result of their charge, they interact with the cell membrane. Endocytosis of the lipoplex then occurs, and the DNA is released into the cytoplasm. The cationic lipids also protect against degradation of the DNA by the cell.

[0433] Complexes of polymers with DNA are referred to as polyplexes. Most polyplexes consist of cationic polymers and their production is regulated by ionic interactions. One large difference between the methods of action of polyplexes and lipoplexes is that polyplexes cannot release their DNA load into the cytoplasm, so to this end, co-transfection with endosome-lytic agents (to lyse the endosome that is made during endocytosis) such as inactivated adenovirus must occur. However, this is not always the case; polymers such as polyethylenimine have their own method of endosome disruption as does chitosan and trimethylchitosan.

[0434] Dendrimers, a highly branched macromolecule with a spherical shape, may be also be used to genetically modify stem cells. The surface of the dendrimer particle may be functionalized to alter its properties. In particular, it is possible to construct a cationic dendrimer (i.e., one with a positive surface charge). When in the presence of genetic material such as a DNA plasmid, charge complementarity leads to a temporary association of the nucleic acid with the cationic dendrimer. On reaching its destination, the dendrimer-nucleic acid complex can be taken up into a cell by endocytosis.

[0435] IX. Therapeutic Methods

[0436] In another aspect, the present disclosure relates to methods of treating a SOD1-related disease in a subject in need thereof, including but not limited to ALS or peripheral neuropathy. In some cases, the allele related to the SOD1-related disorder of the subject to be modified comprises one or more mutations, examples of which have been disclosed, supra. A number of therapeutic strategies have been used to design the compositions for use in the methods of treatment of a subject with a SOD1-related disorder. In some embodiments, the disclosure provides methods of treating a SOD1-related disease in a subject in need thereof in which repression or elimination of expression of the mutant SOD1 protein by modifying the SOD1 gene in target cells of the subject ameliorates the signs, symptoms, or effects of the disease. In such embodiments, the method comprises administering to the subject a therapeutically effective dose of any of the embodiments disclosed herein of: i) the CasX:gNA system comprising a first CasX protein and a first gNA with a targeting sequence complementary to the target nucleic acid and, optionally a donor template; ii) a nucleic acid encoding the CasX:gNA system of (i); iii) a vector comprising the nucleic acid of (ii); a VLP comprising the CasX:gNA system of (i); or iv) combinations thereof, wherein said administering results in 1) modification of the SOD1 target nucleic acid sequence by the CasX protein and, optionally, the donor template; and 2) decreased or elimination of expression of the mutant SOD1 protein in the modified cells of the subject. The methods are described more fully, below.

[0437] In some embodiments, the disclosure provides methods of treating a SOD1-related disease in a subject in need thereof in which correction of the mutant SOD1 gene in target cells of the subject ameliorates the signs, symptoms, or effects of the disease. In such embodiments, the method comprises administering to the subject a therapeutically effective dose of any of the embodiments disclosed herein of: i) the CasX:gNA system comprising a first CasX protein and a first gNA with a targeting sequence complementary to the target nucleic acid and, optionally a donor template; ii) a nucleic acid encoding the CasX:gNA system of (i); iii) a vector comprising the nucleic acid of (ii); a VLP comprising the CasX:gNA system of (i); or iv) combinations thereof, wherein said administering results in 1) modification of the SOD1 target nucleic acid sequence by the CasX protein and, optionally, the donor template; and 2) expression of functional SOD1 protein in the modified cells of the subject. In still other embodiments, the disclosure provides a method of treating a SOD1-related disease in a subject in need thereof by ex vivo modification of a mutant SOD1 target nucleic acid in a populations of cells to correct the mutation and administration of a therapeutically effective dose of the cells to the subject, resulting in amelioration of the signs, symptoms, or effects of the disease. The methods are described more fully, below.

[0438] In some embodiments, the targeting sequence of the gNA used to target the specific sequence of the SOD1 gene of the cells is selected from a sequence of Table 3, or a sequence having at least about 65%, at least about 75%, at least about 85%, or at least about 95% identity thereto. In some embodiments, the targeting sequence of the gNA has a sequence that hybridizes with a SOD1 exon. In some embodiments, the targeting sequence of the gNA has a sequence that hybridizes with a SOD1 intron. In some embodiments, the targeting sequence of the gNA has a sequence that hybridizes with a SOD1 intron-exon junction. In other embodiments, the targeting sequence of the gNA has a sequence that hybridizes with one or more single nucleotide polymorphisms (SNP) of the SOD1 gene. In some embodiments, the targeting sequence of the gNA has a sequence that hybridizes with an intergenic region of the SOD1 gene. In some embodiments, the targeting sequence of the gNA has a sequence that hybridizes with a SOD1 regulatory element. In some embodiments, the targeting sequence of the gNA has a sequence complementary to the SOD1 regulatory element, wherein the SOD1 regulatory element is 5′ of the SOD1 gene. In some embodiments, the targeting sequence of the gNA has a sequence complementary to the SOD1 regulatory element, wherein the SOD1 regulatory element comprises the 5′ untranslated region (UTR) of the SOD1 gene. In some embodiments, the targeting sequence of the gNA has a sequence complementary to the SOD1 regulatory element, wherein the SOD1 regulatory element is 3′ of the SOD1 gene. In some embodiments, the targeting sequence of the gNA has a sequence complementary to the SOD1 regulatory element, wherein the SOD1 regulatory element comprises the 3′UTR of the SOD1 gene. In some embodiments, the targeting sequence of the gNA has a sequence complementary to the SOD1 regulatory element, wherein the SOD1 regulatory element comprises a promoter. In some embodiments, the targeting sequence of the gNA has a sequence complementary to the SOD1 regulatory element, wherein the SOD1 regulatory element comprises an enhancer. In some cases, the gNA used in the method of treatment is chemically modified. The CasX proteins utilized in the methods of treating a SOD-1 related disorder described herein can be selected from the CasX protein sequences of SEQ ID NOS: 1-3 or Table 4, or sequences having at least about 50%, at least about 60%, at least about 70%, at least about 80%, or at least about 90%, or at least about 95%, or at least about 99% sequence identity to the CasX proteins of SEQ ID NOS:1-3 or Table 4. In some cases, the CasX protein and the gNA utilized in the method of treatment are associated together in a ribonuclear protein complex (RNP).

[0439] Upon hybridization with the target nucleic acid by the CasX and the gNA, the CasX introduces one or more single-strand breaks or double-strand breaks within or near the SOD1 gene that results in a modification of the target nucleic acid. In those cases where the method of treatment is intended to knock-down or knock-out the mutant SOD1 gene in the cells of the subject, the CasX:gNA system is designed to modify the target nucleic acid by introducing a permanent indel (deletion or insertion) or a mutation in the target nucleic acid that, together with the host cell repair mechanisms, results in reduced expression of the defective SOD1. In some cases, the expression of the SOD1 protein is reduced by at least about 10%, at least about 20%, at least about 30%, at least about 40%, at least about 50%, at least about 60%, at least about 70%, at least about 80%, or at least about 90% in comparison to cells that have not been modified. In other cases, the SOD1 target nucleic acid of the cells of the subject are modified such that expression of the SOD1 protein cannot be detected. In those cases where the method of treatment is intended to correct the mutant SOD1 gene in the cells of the subject, the CasX:gNA system is designed to modify the target nucleic acid by introducing a permanent indel (deletion or insertion) or a mutation in the target nucleic acid that, together with the host cell repair mechanisms, corrects or compensates for the mutation, with a corresponding expression of functional SOD1 protein by the modified cells.

[0440] In other embodiments, the target nucleic acid of the cells of the subject is modified using a CasX and a plurality of gNAs (e.g., two, three, four or more) targeted to different or overlapping portions of the SOD1 gene wherein the CasX protein introduces multiple breaks in the target nucleic acid sequence. Similarly, as described supra, in those cases where the method of treatment is intended to knock-down or knock-out the mutant SOD1 gene in the cells of the subject, the CasX:gNA system is designed to modify the target nucleic acid by introducing one or more permanent indels (deletion or insertion) or mutations in the target nucleic acid that, together with the host cell repair mechanisms, results in reduced expression of the defective SOD1. In those cases where the method of treatment is intended to correct the mutant SOD1 gene in the cells of the subject, the CasX:gNA system is designed to modify the target nucleic acid by introducing one or more permanent indels (deletion or insertion) or mutations in the target nucleic acid that, together with the host cell repair mechanisms, results in correction or compensates for the mutation, with a corresponding expression of functional SOD1 protein by the modified cells.

[0441] In some embodiments, the disclosure provides methods of treating a SOD1-related disorder in a subject in need thereof comprising modifying the SOD1 gene with a CasX, one or more gNA, and a donor template, wherein the donor template sequence is flanked by an upstream sequence and a downstream sequence with homology adjacent to the break sites in the target nucleic acid introduced by the CasX, facilitating insertion of the donor template sequence. In those cases where the method of treatment is intended to knock-down or knock-out the mutant SOD1 gene in the cells of the subject, the donor template sequence is typically not identical to the genomic sequence that it replaces and may contain one or more single base changes, insertions, deletions, inversions or rearrangements with respect to the genomic sequence, provided that there is sufficient homology with the target nucleic acid sequence to support homology-directed repair or insertion by HITI, which can result in a frame-shift or other mutation such that the non-functional SOD1 protein is not expressed the expression of the mutant SOD1 is reduced by at least about 10%, at least about 20%, at least about 30%, at least about 40%, at least about 50%, at least about 60%, at least about 70%, at least about 80%, at least about 90% in comparison to cells that have not been modified. In those cases where the method of treatment is intended to correct the mutant SOD1 gene in the cells of the subject, the donor template comprises all or a portion of the wild-type SOD1 gene such that its insertion by HDR or HITI results in correction or compensates for the mutation, with a corresponding expression of functional SOD1 protein by the modified cells. In a particular embodiment of the foregoing, gNAs targeting the upstream sequence Exon 1 and Intron 1 can be used to introduce breaks that permit the insertion of full length cDNA encoding the SOD1 protein, replacing the mutated endogenous SOD1 gene and restoring protein expression of functional SOD1; e.g., the protein of SEQ ID NO:100. The donor template inserted by HITI can be any length, for example, a relatively short sequence of between 1 and 50 nucleotides in length, or a longer sequence of about 50-1000 nucleotides in length. The donor template can be a short single-stranded or double-stranded oligonucleotide, or can be a long single-stranded or double-stranded oligonucleotide. The donor template of the embodiments can be designed to encode a SOD1 exon, a SOD1 intron, a SOD1 intron-exon junction, a SOD1 regulatory element, or an intergenic region. The donor template sequence may comprise certain sequence differences as compared to the genomic sequence, e.g., restriction sites, nucleotide polymorphisms, barcodes, selectable markers (e.g., drug resistance genes, fluorescent proteins, enzymes etc.), etc., which may be used to assess for successful insertion of the donor nucleic acid at the cleavage site or, in some cases, may be used for other purposes (e.g., to signify expression at the targeted genomic locus). Alternatively, these sequence differences may include flanking recombination sequences such as FLPs, loxP sequences, or the like, that can be activated at a later time for removal of the marker sequence.

[0442] In other embodiments of the method of treatment, the method further comprises administration to the cells of a subject an additional CRISPR protein, or a polynucleotide (or a vector comprising the polynucleotide) encoding the additional CRISPR protein. In the foregoing embodiment, the additional CRISPR protein has a sequence different from the first CasX protein of the method. In some embodiments, the additional CRISPR protein is not a CasX protein; the additional CRISPR nuclease is selected from the group consisting of Cas9, Cas12a, Cas12b, Cas12c, Cas12d (CasY), Cas13a, Cas13b, Cas13c, Cas13d, CasX, CasY, Cas14, Cpf1, C2cl, Csn2, Cas Phi, and sequence variants thereof.

[0443] In some embodiments, the method comprises administering to the subject the compositions of the embodiments described herein (i.e., the CasX protein, the one or more gNA, and, optionally the donor template, or the one or more polynucleotides encoding the CasX protein, the gNA and the donor template) at a therapeutically effective dose via an administration route selected from the group consisting of intraparenchymal, intravenous, intra-arterial, intracerebroventricular, intracisternal, intrathecal, intracranial, lumbar, and intraperitoneal routes. In some embodiments of the methods of treating a SOD1-related disorder in a subject, the subject is selected from the group consisting of mouse, rat, non-human primate, and human. In a particular embodiment, the subject is a human. In some embodiments, the cell to be modified by the administration of the compositions is a cell of the central nervous system (CNS) or the peripheral nervous system (PNS). In some embodiments, the cell is a neuron. In some embodiments, the neuron is a spinal motor neuron. In other embodiments, the cell is a glial cell, an oligodendrocyte, or a Schwann cell.

[0444] In some embodiments of the method of treatment, the method comprises administration to the subject a therapeutically effective dose of a vector comprising polynucleotides encoding the CasX protein and the gNA, wherein the contacting of the cells of the subject with the vector results in expression of the CasX and gNA and modification of the target nucleic acid of the cells by the CasX:gNA complex. The vectors disclosed herein may be delivered to a subject by several technologies including DNA injection (also referred to as DNA vaccination) with and without in vivo electroporation, liposome mediated, nanoparticle facilitated, or use of recombinant vectors such as recombinant lentivirus, recombinant adenovirus, and recombinant adenovirus associated virus. In some embodiments, the method comprises administration of the vector comprising a polynucleotide encoding a CasX and a plurality of gNAs targeted to the SOD1 gene wherein the administration results in contacting the subject target nucleic acid within cells of the subject with the expression product(s) of the vectors wherein the SOD1 gene is modified in the cell of the subject. In other embodiments of the method of treatment, the method comprises contacting the cell with a vector encoding the CasX protein and the gNA and further comprising a donor template wherein said contacting results in modification of the target nucleic acid of the cell by cleavage by the CasX protein and insertion of the donor template into the target nucleic acid. In other embodiments of the method of treatment, the method comprises contacting the cell with a first vector encoding the CasX protein and the gNA and a second vector comprising the donor template. In other embodiments, the method comprises administration of the vector comprising a polynucleotide encoding a CasX and a plurality of gNAs targeted to the SOD1 gene and a second vector comprising a donor template polynucleotide encoding at least a portion of or the entirety of a SOD1 gene wherein the administration of the vectors results in contacting the subject target nucleic acid within a cell of the subject with the expression product(s) of the CasX and gNA vectors and the donor template wherein the SOD1 gene is modified in the cell of the subject. In some cases, wherein the CasX:gNA system is designed to correct the SOD1 mutation, the donor template is a SOD1 gene or a gene portion selected from a SOD1 exon, a SOD1 intron, a SOD1 intron-exon junction, or a SOD1 regulatory element and wherein the donor template comprises a corrective sequence that is inserted into the target nucleic acid of the subject. In other cases, wherein the CasX:gNA system is designed to knock-down/knock-out the SOD1 gene, the donor template comprises one or more single base changes, insertions, deletions, inversions or rearrangements with respect to the genomic sequence mutations in the SOD1 gene portion, whereupon insertion of the donor template the gene is knocked-down or knocked-out. In some embodiments, the vector is a viral particle. In some embodiments, the vector is an AAV vector (described supra). The vectors of the embodiments are administered to the subject at a therapeutically effective dose. In some embodiments, the vector is administered at a dose of at least about 1×10¹⁰ vector genomes (vg), or at least about 1×10¹¹ vg, or at least about 1×10¹² vg, or at least about 1×10¹³ vg, or at least about 1×10¹⁴ vg, or at least about 1×10¹⁵ vg, or at least about 1×10¹⁶ vg. In other embodiments, the subject is administered a dose of at least about 1×10¹⁰ to about 1×10¹⁶ vg.

[0445] In other embodiments of the method of treatment, the method comprises administration to the subject a therapeutically effective dose of a VLP comprising the CasX protein and the gNA and, optionally, the donor template (described, supra), wherein the contacting of the cells of the subject with the VLP results in modification of the target nucleic acid of the cells by the CasX:gNA complex. In some embodiments, the method comprises administration of the VLP comprising a CasX and a plurality of gNAs targeted to different locations in the SOD1 gene, wherein the contacting of the cells of the subject with the VLP results in modification of the target nucleic acid of the cells by the CasX:gNA complexes. As previously described, the components can be designed to knock-down/knock-out the SOD1 gene or to knock-in a corrective sequence. The VLP of the embodiments are administered to the subject at a therapeutically effective dose. In some embodiments, the VLP is administered to the subject at a dose of at least about 1×10⁸ particles, at least about 1×10⁹ particles, at least about 1×10¹⁰ particles at least about 1×10¹¹ particles, or at least about 1×10¹² particles, or at least about 1×10¹³ particles, or at least about 1×10¹⁴ particles, or at least about 1×10¹⁵ particles, or at least about 1×10¹⁶ particles.

[0446] In some embodiments, the vectors or VLP may be administered to a subject by various routes, wherein the route of administration is selected from the group consisting of intraparenchymal, intravenous, intra-arterial, intracerebroventricular, intracisternal, intrathecal, intracranial, lumbar, and intraperitoneal routes. In some embodiments of the method of treatment, the vector or VLP is delivered to the central nervous system of the subject. In some embodiments, the vector or VLP is delivered to a brain region. Areas of the brain contemplated for delivery include, but are not limited to, the motor cortex and the brain stem. In some embodiments, the vector or VLP is delivered to the spinal cord. In certain embodiments, the vector or VLP is delivered to the cerebrospinal fluid. In some embodiments of the method, the vector or VLP is delivered to the peripheral nervous system region. In some embodiments, the vector or VLP is delivered to nerve and glial cells, including those of the central nervous system and the peripheral nervous system. In some embodiments, the glial cell is a microglial cell, an oligodendrocyte or an astrocyte. In some embodiments of the method, the polynucleotide is delivered to a Schwann cell. In the embodiments, the vector or VLP may be administered according to a treatment regimen comprising one or more consecutive doses using a therapeutically effective dose of the vector. In some embodiments of the treatment regimen, the therapeutically effective dose of the vector or VLP is administered as a single dose. In other embodiments of the treatment regimen, the therapeutically effective dose of the vector or VLP is administered to the subject as two or more doses over a period of at least two weeks, or at least one month, or at least two months, or at least three months, or at least four months, or at least five months, or at least six months, or on an annual basis, or every 2 or 3 years.

[0447] In some embodiments, the disclosure provides methods of treating a SOD1-related disorder (e.g., ALS) in a subject comprising administering to the subject a therapeutically effective dose of a population of modified eukaryotic cells of the disclosure, the cells comprising a modified SOD1 gene in which the mutations have been corrected or in which a wild-type SOD1 sequence is inserted such that the cells produce functional SOD1. In some embodiments, the population of cells are autologous with respect to the subject to be administered the cells. In other embodiments, the population of cells are allogenic with respect to the subject to be administered the cells. In some embodiments, the population of modified cells is selected from the group consisting of embryonic stem (ES) cells, induced pluripotent stem cell (iPSC), central nervous system (CNS) cells, and peripheral nervous system (PNS) cells. In some embodiments, the population of cells comprise neuron cells of the CNS or the PNS. In some cases, the neuron cells comprise spinal motor neuron cells or oligodendrocyte cells. In other embodiments, the population of cells comprise glial cells or Schwann cells of the PNS. The cells can be derived from a subject selected from the group consisting of rodent, mouse, rat, non-human primate, and human. In the embodiments, the population of cells can be administered according to a treatment regimen comprising one or more consecutive doses using a therapeutically effective dose of the cells. In some embodiments of the treatment regimen, the therapeutically effective dose of the cells is administered as a single dose. In other embodiments of the treatment regimen, the therapeutically effective dose of the cells is administered to the subject as two or more doses over a period of at least two weeks, or at least one month, or at least two months, or at least three months, or at least four months, or at least five months, or at least six months, or on an annual basis, or every 2 or 3 years. In the embodiments, the route of administration is selected from intraparenchymal, intravenous, intra-arterial, intracerebroventricular, intracisternal, intrathecal, intracranial, lumbar, intraperitoneal, or combinations thereof. This approach, therefore, could be used for methods of treatment in a subject with a SOD1-related disease such as ALS.

[0448] In some embodiments, the administration of the therapeutically effective amount of a vector, a VLP, a CasX-gNA composition, or a plurality of modified cell embodiments disclosed herein to the subject leads to the prevention or amelioration of the underlying SOD1-related disorder (e.g., ALS) such that an improvement is observed in the subject, notwithstanding that the subject may still be afflicted with the underlying disorder. In some embodiments, the administration of the therapeutically effective amount of the vector, the VLP, the CasX-gNA composition or the modified cells leads to an improvement in at least one clinically-relevant endpoint selected from the group consisting of ALS Functional Rating Scale (ALSFRS-(R)), combined assessment of function and survival, time to death, time to tracheostomy or persistent assisted ventilation (DTP), forced vital capacity (% FVC), manual muscle test, maximum voluntary isometric contraction, duration of response, progression-free survival, time to progression of disease, and time-to-treatment failure. In some embodiments, the administration of the therapeutically effective amount of the vector, the VLP, the CasX-gNA composition or the modified cells leads to an improvement in at least two clinically-relevant endpoints selected from the group consisting of ALS Functional Rating Scale (ALSFRS-(R)), combined assessment of function and survival, time to death, time to tracheostomy or persistent assisted ventilation (DTP), forced vital capacity (% FVC), manual muscle test, maximum voluntary isometric contraction, duration of response, progression-free survival, time to progression of disease, and time-to-treatment failure. In the embodiments of the foregoing, the subject is a mammal selected from mouse, rat, non-human primate, and human. Several mouse models expressing mutant forms of SOD1 exist. Transgenic mouse models expressing the human SOD1 gene harboring a G93A, G37R, or G85R mutation develop a phenotype similar to what is observed in human ALS patients; the transgenic SOD1 mouse is considered the most accurate representation of the disease process (Gurney M E, et al. Motor neuron degeneration in mice that express a human Cu, Zn superoxide dismutase mutation. Science. 264:1772 (1994); Philips, T and Jeffrey D. Rothstein, J. Rodent Models of Amyotrophic Lateral Sclerosis. Curr Protoc Pharmacol. 69: 5.67.1-5.67.21. (2015).

[0449] In some embodiments, the disclosure provides compositions comprising CasX and gNA gene editing pairs, for use as a medicament for the treatment of a subject having a SOD1 related disorder, such as ALS. In the foregoing, the CasX can be a CasX variant of Table 4 and the gNA can be a gNA variant of Table 3. In other embodiments, the disclosure provides compositions of vectors comprising or encoding the gene editing pairs of CasX and gNA for use as a medicament for the treatment of a subject having a SOD1 related disorder, such as ALS.

[0450] X. Kits and Articles of Manufacture

[0451] In another aspect, provided herein are kits comprising the compositions of the embodiments described herein. In some embodiments, the kit comprises a CasX protein and one or a plurality of gNA of any of the embodiments of the disclosure comprising a targeting sequence region specific for a SOD1 gene, optionally a donor template, and a suitable container (for example a tube, vial or plate). In other embodiments, the kit comprises a nucleic acid encoding a CasX protein and one or a plurality of gNA of any of the embodiments of the disclosure comprising a targeting sequence region specific for a SOD1 gene, optionally a donor template, and a suitable container. In other embodiments, the kit comprises a vector comprising a nucleic acid encoding a CasX protein and one or a plurality of gNA of any of the embodiments of the disclosure comprising a targeting sequence region specific for a SOD1 gene, and a suitable container. In still other embodiments, the kit comprises a VLP comprising a CasX protein and one or a plurality of gNA of any of the embodiments of the disclosure comprising a targeting sequence region specific for a SOD1 gene, optionally a donor template, and a suitable container.

[0452] In some embodiments, the kit further comprises a buffer, a nuclease inhibitor, a protease inhibitor, a liposome, a therapeutic agent, a label, a label visualization reagent, or any combination of the foregoing. In some embodiments, the kit further comprises a pharmaceutically acceptable carrier, diluent or excipient.

[0453] In some embodiments, the kit comprises appropriate control compositions for gene modifying applications, and instructions for use.

[0454] The present description sets forth numerous exemplary configurations, methods, parameters, and the like. It should be recognized, however, that such description is not intended as a limitation on the scope of the present disclosure, but is instead provided as a description of exemplary embodiments.

[0455] XI. Enumerated Embodiments

[0456] Embodiments of the present subject matter described above may be beneficial alone or in combination, with one or more other embodiments. Without limiting the foregoing description, certain non-limiting enumerated embodiments of the disclosure, numbered 1-234 are provided below. As will be apparent to those of skill in the art upon reading this disclosure, each of the individually numbered embodiments may be used or combined with any of the preceding or following individually numbered embodiments. This is intended to provide support for all such combinations of embodiments and is not limited to combinations of embodiment explicitly provided below:

### Set 1

[0457] Embodiment 1. A method of modifying a target nucleic acid, the method comprising contacting the target nucleic acid with a CasX polypeptide and a guide nucleic acid (gNA) comprising a targeting sequence wherein said contacting results in modification of the target nucleic acid by the CasX protein, and wherein said contacting comprises introducing into a cell:
[0458] a) the CasX protein or a nucleic acid encoding the CasX protein; and
[0459] b) the gNA or a nucleic acid encoding the gNA,

[0460] wherein the target nucleic acid comprises a superoxide dismutase 1 (SOD1) gene and/or a SOD1 regulatory element, and wherein the targeting sequence comprises i) a sequence complementary to a portion of the SOD1 gene and/or the SOD1 regulatory element; or ii) a sequence complementary to a complement of the portion of the SOD1 gene and/or SOD1 regulatory element.

[0461] Embodiment 2. The method of 1, further comprising a second gNA or a nucleic acid encoding the second gNA, wherein the second gNA has a targeting sequence complementary a different portion of the target nucleic acid or its complement.

[0462] Embodiment 3. The method of 1, wherein the target nucleic acid is a target DNA.

[0463] Embodiment 4. The method of any one of 1-3, wherein the gNA is a guide RNA (gRNA), a guide DNA (gDNA), or a chimera comprising DNA and RNA.

[0464] Embodiment 5. The method of any one of 1-4, wherein the gNA comprises at least one modification relative to a reference gRNA sequence having the sequence of SEQ ID NO:2102.

[0465] Embodiment 6. The method of 5, wherein the at least one modification of the reference gRNA comprises at least one substitution, deletion, or substitution of a nucleotide of the gRNA sequence.

[0466] Embodiment 7. The method of any one of 1-4, wherein the gNA comprises any one of the sequences listed in Tables 2A or 2B.

[0467] Embodiment 8. The method of any one of the preceding embodiments, wherein the CasX polypeptide and the gNA are associated together in a ribonuclear protein complex (RNP).

[0468] Embodiment 9. The method of any one of the preceding embodiments, wherein the CasX protein comprises at least one modification relative to a reference CasX protein having a sequence selected from SEQ ID NOS: 1-3.

[0469] Embodiment 10. The method of 9, wherein the at least one modification of the reference CasX protein comprises at least one amino acid substitution, deletion, or substitution in a domain of the reference CasX protein.

[0470] Embodiment 11. The method of 10, wherein the at least one modification of the reference Cas X protein comprises at least one amino acid deletion in a domain of the reference CasX protein.

[0471] Embodiment 12. The method of 10, wherein the at least one modification of the reference Cas X protein comprises at least one amino acid insertion in a domain of the reference CasX protein.

[0472] Embodiment 13. The method of 10, wherein the at least one modification of the reference Cas X protein comprises at least one amino acid substitution in a domain of the reference CasX protein.

[0473] Embodiment 14. The method of any one of 1-13, wherein the CasX protein comprises a sequence selected from the sequences of Table 4 or a sequence having at least about 50%, at least about 60%, at least about 70%, at least about 80%, or at least about 90%, or at least about 95%, or at least about 99% sequence identity to a sequence of Table 4.

[0474] Embodiment 15. The method of any one of the preceding embodiments, wherein the one or more nucleic acids encoding the CasX protein and the gNA are capable of being expressed in a cell.

[0475] Embodiment 16. The method of any one of the preceding wherein the CasX protein exhibits at least one or more improved characteristics as compared to a reference CasX protein.

[0476] Embodiment 17. The method of 16, wherein the improved characteristic is selected from the group consisting of improved folding of the Cas X protein, improved binding affinity to the guide RNA, improved binding affinity to the target nucleic acid, altered binding affinity to one or more PAM sequences, improved unwinding of the target nucleic acid, increased activity, improved editing efficiency, improved editing specificity, increased activity of the nuclease, increased target strand loading for double strand cleavage, decreased target strand loading for single strand nicking, decreased off-target cleavage, improved binding of the non-target strand of DNA, improved protein stability, improved protein:guide RNA complex stability, improved protein solubility, improved protein:guide RNA complex solubility, improved protein yield, improved protein expression, and improved fusion characteristics.

[0477] Embodiment 18. The method of 16 or 17, wherein the improved characteristic of the CasX protein is at least about 1.1 to about 100,000 times improved relative to the reference protein of SEQ ID NO: 1, SEQ ID NO: 2, or SEQ ID NO: 3.

[0478] Embodiment 19. The method of 16 or 17, wherein the improved characteristics of the CasX protein is at least about 10 to about 100 times improved relative to the reference protein of SEQ ID NO: 1, SEQ ID NO: 2, or SEQ ID NO:3.

[0479] Embodiment 20. The method of 16 or 17, wherein the improved characteristic of the CasX protein is at least about 1.1 to about 100 times increased binding affinity of the CasX protein to the gNA compared to the protein of SEQ ID NO: 1, SEQ ID NO: 2, or SEQ ID NO: 3.

[0480] Embodiment 21. The method of 16 or 17, wherein the CasX protein has at least about 1.1 to about 2 times increased binding affinity to the target nucleic acid compared to the protein of SEQ ID NO: 1, SEQ ID NO: 2, or SEQ ID NO: 3.

[0481] Embodiment 22. The method of any one of the preceding embodiments, wherein the modifying of the target nucleic acid occurs inside of a cell.

[0482] Embodiment 23. The method of 22, wherein the modifying of the target nucleic acid occurs in vivo.

[0483] Embodiment 24. The method of 22, wherein the modifying of the target nucleic acid occurs in vitro.

[0484] Embodiment 25. The method of any one of 22-24, wherein the cell is a eukaryotic cell.

[0485] Embodiment 26. The method of 25, wherein the eukaryotic cell is selected from the group consisting of a plant cell, a fungal cell, a mammalian cell, a reptile cell, an insect cell, an avian cell, a fish cell, a parasite cell, an arthropod cell, a cell of an invertebrate, a cell of a vertebrate, a rodent cell, a mouse cell, a rat cell, a primate cell, a non-human primate cell, and a human cell.

[0486] Embodiment 27. The method of 25, wherein the eukaryotic cell is a human cell.

[0487] Embodiment 28. The method of any one of 22-25 or 27, wherein the cell is a cell of a central nervous system (CNS) or peripheral nervous system (PNS).

[0488] Embodiment 29. The method of 28, wherein the cell is a neuron.

[0489] Embodiment 30. The method of 29, wherein the neuron is a spinal motor neuron.

[0490] Embodiment 31. The method of 28, wherein the cell is a glial cell, an oligodendrocyte, or a Schwann cell.

[0491] Embodiment 32. The method of any one of the preceding embodiments, wherein the CasX protein is selected from the CasX proteins provided in SEQ ID NOS: 1-3 or Table 4 or sequences having at least about 50%, at least about 60%, at least about 70%, at least about 80%, or at least about 90%, or at least about 95%, or at least about 99% sequence identity to the CasX proteins of SEQ ID NOS:1-3 or Table 4.

[0492] Embodiment 33. The method of any one of the preceding embodiments, wherein the CasX protein has binding affinity for a PAM sequence selected from the group consisting of TTC, ATC, GTC, and CTC.

[0493] Embodiment 34. The method of any one of the preceding embodiments, wherein the CasX protein comprises nickase activity.

[0494] Embodiment 35. The method any one of the preceding embodiments, wherein the method comprises modifying the SOD1 gene or the SOD1 regulatory element in a cell.

[0495] Embodiment 36. The method of 35, wherein the modifying comprises introducing a single-stranded break in the target nucleic acid, and wherein modification of the SOD1 gene or the SOD1 regulatory element comprises a mutation, an insertion, or a deletion in the SOD1 gene or the SOD1 regulatory element.

[0496] Embodiment 37. The method of 35, wherein the modifying comprises introducing a double-stranded break in the target nucleic acid, and wherein modification of the SOD1 gene or the SOD1 regulatory element comprises a mutation, an insertion, or a deletion.

[0497] Embodiment 38. The method of any one of 1-35, wherein the CasX protein is a catalytically inactive CasX (dCasX) protein, and wherein the dCasX and the gNA retain the ability to bind to the target nucleic acid.

[0498] Embodiment 39. The method of 38, wherein the dCasX comprises a mutation at residues:
[0499] i) D672, E769, and/or D935 corresponding to the CasX protein of SEQ ID NO:1; or
[0500] ii) D659, E756 and/or D922 corresponding to the CasX protein of SEQ ID NO: 2.

[0501] Embodiment 40. The method of 39 wherein the mutation is a substitution of alanine for the residue.

[0502] Embodiment 41. The method of any one of 1 to 40, wherein the SOD1 gene and/or the SOD1 regulatory element to be modified comprises a polynucleotide encoding all or a portion of the sequence of SEQ ID NO:100, or comprises a polynucleotide sequence that spans bp 31,659,622 to bp 31,668,931 of chromosome 21 of the human genome (GRCh38/hg38).

[0503] Embodiment 42. The method of any one of 1 to 40, wherein the SOD1 gene and/or the SOD1 regulatory element to be modified comprises a wild type sequence.

[0504] Embodiment 43. The method of any one of 1 to 40, wherein the SOD1 gene and/or the SOD1 regulatory element to be modified comprises a mutation.

[0505] Embodiment 44. The method of 43, wherein the mutation is a gain of function mutation.

[0506] Embodiment 45. The method of 43, wherein the mutation is a loss of function mutation.

[0507] Embodiment 46. The method of 43, wherein the SOD1 gene encodes a polypeptide comprising a mutation selected from mutations set forth in Table 1 or comprises one or more mutations that disrupt the function of the SOD1 polypeptide.

[0508] Embodiment 47. The method of 46, wherein the SOD1 gene encodes a polypeptide comprising an A4V mutation of SEQ ID NO:100, a D90A mutation of SEQ ID NO:100, a G93A mutation of SEQ ID NO:100, or a combination thereof.

[0509] Embodiment 48. The method of any one of 43-47, wherein the modification comprises correction of the mutation to wild-type sequence.

[0510] Embodiment 49. The method of any one of 43-47, wherein the modification comprises altering or suppressing expression of the SOD1 comprising the mutation.

[0511] Embodiment 50. The method of any one of 1-49, wherein the targeting sequence of the gNA consists of 14, 15, 16, 17, 18, 19, 20, 21, 22, 23, 24, 25, 26, 27, 28, 29, or 30 consecutive nucleotides.

[0512] Embodiment 51. The method of any one of 1-50, wherein the targeting sequence of the gNA consists of 20 nucleotides.

[0513] Embodiment 52. The method of any one of 1-51, wherein the targeting sequence of the gNA comprises a sequence having at least about 65%, at least about 75%, at least about 85%, or at least about 95% identity to a sequence provided in Table 3.

[0514] Embodiment 53. The method of any one of 1-52, wherein the targeting sequence of the gNA comprises a sequence having one or more single nucleotide polymorphisms (SNP) relative to a sequence provided in Table 3.

[0515] Embodiment 54. The method of 52 or 53, wherein the targeting sequence encodes a mutation of the SOD1 polypeptide of SEQ ID NO:100 selected from the group of amino acid substitutions consisting of A4S, A4T, A4V, C6F, V7E, L8Q, L8V, G12R, V14G, V14M, G16S, F20C, E21G, E21K, Q22L, G37R, L38R, L38V, G41D, G41S, H43R, F45C, H46R, H48Q, H48R, E49K, T54R, N65S, L67P, L67R, G72S, D76Y, H80A, L84F, L84V, G85R, N86S, V87A, A89T, A89V, D90A, D90V, G93A, G93C, G93D, G93R, G93V, A95G, V97M, E100G, E100K, D101G, D101N, I104F, S105L, L106V, G108V, C111Y, I112M, I112T, I113T, G114A, R115G, V118L, D124G, D124V, D125H, L126S, S134N, N139K, L144F, L144S, A145T, C146R, G147R, V148G, V1481, 1149T, I151T, and one or more mutations that disrupt the function or expression of the SOD1 polypeptide.

[0516] Embodiment 55. The method of any one of the preceding embodiments, wherein the gNA is chemically modified.

[0517] Embodiment 56. The method of any one of the preceding embodiments, wherein the targeting sequence of the gNA is complementary to the SOD1 gene or its regulatory element, or complementary to the complement of the SOD1 gene or its regulatory element.

[0518] Embodiment 57. The method of 56, wherein the targeting sequence of the gNA has a sequence that is a sequence of a SOD1 exon or a sequence complementary to a SOD1 exon.

[0519] Embodiment 58. The method of 56, wherein the targeting sequence of the gNA has a sequence that is a sequence of a SOD1 intron or a sequence complementary to a SOD1 intron.

[0520] Embodiment 59. The method of 56, wherein the targeting sequence of the gNA has a sequence that is a sequence of a SOD1 intron-exon junction or a sequence complementary to a SOD1 intron-exon junction.

[0521] Embodiment 60. The method of any one of 1-59, wherein the targeting sequence of the gNA has a sequence that hybridizes with one or more single nucleotide polymorphisms (SNPs) of the SOD1 gene and/or a SOD1 regulatory element.

[0522] Embodiment 61. The method of 56, wherein the targeting sequence of the gNA has a sequence that is a sequence of an intergenic region of the SOD1 gene or a sequence complementary to an intergenic region of the SOD1 gene.

[0523] Embodiment 62. The method of any one of 1 to 55, wherein the targeting sequence of the gNA is a sequence of a SOD1 regulatory element or a sequence that is complementary to a SOD1 regulatory element.

[0524] Embodiment 63. The method of 62, wherein the SOD1 regulatory element is 5′ of the SOD1 gene.

[0525] Embodiment 64. The method of 62, wherein the SOD1 regulatory element is 3′ of the SOD1 gene.

[0526] Embodiment 65. The method of 62, wherein the SOD1 regulatory element comprises the 5′ UTR of the SOD1 gene.

[0527] Embodiment 66. The method of 62, wherein the SOD1 regulatory element comprises the 3′UTR of the SOD1 gene.

[0528] Embodiment 67. The method of 62, wherein the SOD1 regulatory element comprises a promoter.

[0529] Embodiment 68. The method of 62, wherein the SOD1 regulatory element comprises an enhancer.

[0530] Embodiment 69. The method of any one of 1 to 68, wherein the targeting sequence of the gNA has binding specificity for the SOD1 gene or the SOD1 regulatory element.

[0531] Embodiment 70. The method of any one of the preceding embodiments, wherein the method further comprises contacting the target nucleic acid with a donor template complementary to at least a portion of a SOD1 gene and/or a SOD1 regulatory element, wherein the SOD1 gene portion is selected from the group consisting of a SOD1 exon, a SOD1 intron, a SOD1 intron-exon junction, and wherein the SOD1 gene portion and/or a SOD1 regulatory element is inserted into or replaces the target nucleic acid comprising the one or more mutations.

[0532] Embodiment 71. The method of 70, wherein the donor template ranges in size from 10-10,000 nucleotides.

[0533] Embodiment 72. The method of 70, wherein the donor template ranges in size from 100-1,000 nucleotides.

[0534] Embodiment 73. The method of any one of 70-72, wherein the donor template is a single stranded DNA template or a single stranded RNA template.

[0535] Embodiment 74. The method of any one of 70-72, wherein the donor template is a double stranded DNA template.

[0536] Embodiment 75. The method of any one of 1 to 74, wherein the method comprises contacting the target nucleic acid with a pre-complexed CasX protein-gNA.

[0537] Embodiment 76. The method of 75, wherein the gNA comprises at least one nucleotide modification relative to a reference sequence selected from SEQ ID NOS: 1101-1105 of Table 2A, wherein the modification results in one or more improved characteristic in the method.

[0538] Embodiment 77. The method of 76, wherein the one or more improved characteristic comprises improved protein:gNA complex stability, improved protein:gNA complex stability, improved binding affinity between the protein and gNA, improved binding affinity to the target DNA, improved unwinding of the target DNA, increased activity, improved editing efficiency, improved editing specificity, increased activity of the nuclease, increased target strand loading for double strand cleavage, decreased target strand loading for single strand nicking, decreased off-target cleavage, improved binding of the non-target strand of DNA, or improved resistance to nuclease activity.

[0539] Embodiment 78. The method of any one of 75-77, wherein the method comprises contacting a eukaryotic cell comprising the target nucleic acid with a liposome, a lipid nanoparticle, or a virus-like particle (VLP) comprising the CasX protein and the gNA.

[0540] Embodiment 79. The method of any one of 75-77, wherein the method comprises contacting a eukaryotic cell comprising the target nucleic acid with the one or more nucleic acids encoding the CasX protein and the gNA, and optionally the donor template.

[0541] Embodiment 80. The method of 79, wherein the nucleic acid encoding the CasX protein further comprises one or more nuclear localization signals (NLS).

[0542] Embodiment 81. The method of 80, wherein the one or more NLS are selected from the group of sequences consisting of PKKKRKV (SEQ ID NO: 145), KRPAATKKAGQAKKKK (SEQ ID NO: 146), PAAKRVKLD (SEQ ID NO: 147), RQRRNELKRSP (SEQ ID NO: 148), NQSSNFGPMKGGNFGGRSSGPYGGGGQYFAKPRNQGGY (SEQ ID NO: 149), RMRIZFKNKGKDTAELRRRRVEVSVELRKAKKDEQILKRRNV (SEQ ID NO: 150), VSRKRPRP (SEQ ID NO: 151), PPKKARED (SEQ ID NO: 152), PQPKKKPL (SEQ ID NO: 153), SALIKKKKKMAP (SEQ ID NO: 154), DRLRR (SEQ ID NO: 155), PKQKKRK (SEQ ID NO: 156), RKLKKKIKKL (SEQ ID NO: 157), REKKKFLKRR (SEQ ID NO: 158), KRKGDEVDGVDEVAKKKSKK (SEQ ID NO: 159), RKCLQAGMNLEARKTKK (SEQ ID NO: 160), PRPRKIPR (SEQ ID NO: 161), PPRKKRTVV (SEQ ID NO: 162), NLSKKKKRKREK (SEQ ID NO: 163), RRPSRPFRKP (SEQ ID NO: 164), KRPRSPSS (SEQ ID NO: 165), KRGINDRNFWRGENERKTR (SEQ ID NO: 166), PRPPKMARYDN (SEQ ID NO: 167), KRSFSKAF (SEQ ID NO: 168), KLKIKRPVK (SEQ ID NO: 169), PKTRRRPRRSQRKRPPT (SEQ ID NO: 171), RRKKRRPRRKKRR (SEQ ID NO: 174), PKKKSRKPKKKSRK (SEQ ID NO: 175), HKKKHPDASVNFSEFSK (SEQ ID NO: 176), QRPGPYDRPQRPGPYDRP (SEQ ID NO: 177), LSPSLSPLLSPSLSPL (SEQ ID NO: 178), RGKGGKGLGKGGAKRHRK (SEQ ID NO: 179), PKRGRGRPKRGRGR (SEQ ID NO: 180), and MSRRRKANPTKLSENAKKLAKEVEN (SEQ ID NO: 205).

[0543] Embodiment 82. The method of 80 or 81, wherein the one or more NLS are expressed at the C-terminus of the CasX protein.

[0544] Embodiment 83. The method of 80 or 81, wherein the one or more NLS are expressed at the N-terminus of the CasX protein.

[0545] Embodiment 84. The method of 80 or 81, wherein the one or more NLS are expressed at the N-terminus and C-terminus of the CasX protein.

[0546] Embodiment 85. The method of any one of 79 to 84, wherein the one or more polynucleotides encoding the CasX protein are codon optimized for expression in a eukaryotic cell.

[0547] Embodiment 86. The method of any one of 79 to 85, wherein the method comprises contacting the eukaryotic cell with a vector encoding the CasX protein and the gNA, and optionally further encoding the donor template.

[0548] Embodiment 87. The method of 86, wherein the vector is an Adeno-Associated Viral (AAV) vector.

[0549] Embodiment 88. The method of 87, wherein the AAV is AAV1, AAV2, AAV3, AAV4, AAV5, AAV6, AAV7, AAV8, AAV9, AAV10, AAV-Rh74, or AAVRh10.

[0550] Embodiment 89. The method of 86, wherein the vector is a lentiviral vector.

[0551] Embodiment 90. The method of any one of 86-89, wherein the vector is administered to a subject at a therapeutically effective dose.

[0552] Embodiment 91. The method of 90, wherein the subject is selected from the group consisting of mouse, rat, non-human primate, and human.

[0553] Embodiment 92. The method of 91, wherein the subject is a human.

[0554] Embodiment 93. The method of any one of 90-92, wherein the vector is administered at a dose of at least about 1×1010 vector genomes (vg), or at least about 1×1011 vg, or at least about 1×1012 vg, or at least about 1×1013 vg, or at least about 1×1014 vg, or at least about 1×1015 vg, or at least about 1×1016 vg.

[0555] Embodiment 94. The method of any one of 90-93, wherein the vector is administered by a route of administration selected from the group consisting of intraparenchymal, intravenous, intra-arterial, intracerebroventricular, intracisternal, intrathecal, intracranial, and intraperitoneal routes.

[0556] Embodiment 95. The method of any one of the preceding embodiments, comprising further contacting the target nucleic acid with an additional CRISPR protein, or a polynucleotide encoding the additional CRISPR protein.

[0557] Embodiment 96. The method of 95, wherein the additional CRISPR protein is a CasX protein having a sequence different from the CasX of any of the preceding embodiments.

[0558] Embodiment 97. The method of 95, wherein the additional CRISPR protein is not a CasX protein.

[0559] Embodiment 98. The method of any one of 1 to 97, wherein the gNA is a single-molecule gNA (sgNA).

[0560] Embodiment 99. The method of any one of 1 to 97, wherein the gNA is a dual-molecule gNA (dgNA).

[0561] Embodiment 100. The method of any one of 1 to 99, comprising contacting the target nucleic acid with a plurality of gNAs targeted to the SOD1 gene and/or the SOD1 regulatory element having an allele with one or more mutations.

[0562] Embodiment 101. A cell comprising a modified SOD1 gene and/or a modified SOD1 regulatory element, wherein the modified SOD1 gene and/or the modified SOD1 regulatory element has been modified by either:
[0563] a) delivering to the cell a CasX protein and a guide nucleic acid (gNA) comprising a targeting sequence; or
[0564] b) delivering to the cell one or more nucleic acids encoding a CasX protein and a gNA comprising a targeting sequence,
[0565] wherein the targeting sequence of the gNA has binding specificity for the SOD1 gene and/or the SOD1 regulatory element.

[0566] Embodiment 102. The cell of 101, wherein the gNA is a guide RNA (gRNA).

[0567] Embodiment 103. The cell of 102, wherein the targeting sequence of the gNA comprises a sequence having at least about 65%, at least about 75%, at least about 85%, or at least about 95% identity to a sequence provided in Table 3.

[0568] Embodiment 104. The cell of 101 or 102, wherein the targeting sequence of the gNA comprises a sequence having one or more single nucleotide polymorphisms (SNP) relative to a sequence provided in Table 3.

[0569] Embodiment 105. The cell of 103 or 104, wherein the targeting sequence encodes a mutation of the SOD1 polypeptide of SEQ ID NO:100 selected from the group of amino acid substitutions consisting of A4S, A4T, A4V, C6F, V7E, L8Q, L8V, G12R, V14G, V14M, G16S, F20C, E21G, E21K, Q22L, G37R, L38R, L38V, G41D, G41S, H43R, F45C, H46R, H48Q, H48R, E49K, T54R, N65S, L67P, L67R, G72S, D76Y, H80A, L84F, L84V, G85R, N86S, V87A, A89T, A89V, D90A, D90V, G93A, G93C, G93D, G93R, G93V, A95G, V97M, E100G, E100K, D101G, D101N, 1104F, S105L, L106V, G108V, C111Y, I112M, I112T, I113T, G114A, R115G, V118L, D124G, D124V, D125H, L126S, S134N, N139K, L144F, L144S, A145T, C146R, G147R, V148G, V1481, 1149T, I151T or mutations that disrupt the function or expression of the SOD1 polypeptide.

[0570] Embodiment 106. The method of any one of 101-105, wherein the CasX polypeptide and the gNA are associated together in a ribonuclear protein complex (RNP).

[0571] Embodiment 107. The cell of any one of 101-105, wherein the modified SOD1 gene and/or the SOD1 regulatory element comprises a single-stranded break, and wherein the modified SOD1 gene and/or the SOD1 regulatory element comprises a mutation, an insertion, or a deletion.

[0572] Embodiment 108. The cell of any one of 101-105, wherein the modified SOD1 gene and/or the SOD1 regulatory element comprises a double-stranded break, and wherein the modified SOD1 gene and/or the SOD1 regulatory element comprises a mutation, an insertion, or a deletion.

[0573] Embodiment 109. The cell of 106 or 108, wherein the insertion comprises a donor template comprising at least a portion of a SOD1 gene and/or the SOD1 regulatory element, and wherein the SOD1 gene portion is selected from the group consisting of a SOD1 exon, a SOD1 intron, and a SOD1 intron-exon junction.

[0574] Embodiment 110. The cell of 109, wherein the donor template ranges in size from 20-10,000 nucleotides.

[0575] Embodiment 111. The cell of 109 or 110, wherein the donor template is a single-stranded DNA template or a single stranded RNA template.

[0576] Embodiment 112. The method of 109 or 110, wherein the donor template is a double-stranded DNA template.

[0577] Embodiment 113. The cell of any one of 101-112, wherein modification of the SOD1 gene and/or the SOD1 regulatory element occurs in vivo.

[0578] Embodiment 114. The cell of any one of 101-112, wherein modification of the SOD1 gene and/or the SOD1 regulatory element occurs in vitro.

[0579] Embodiment 115. The cell of 113 or 114, wherein the modification corrects the one or more mutations, or wherein expression of the SOD1 having the one or more mutations is inhibited or suppressed.

[0580] Embodiment 116. The cell of any one of 101-115, wherein the cell is a eukaryotic cell.

[0581] Embodiment 117. The cell of 116, wherein the eukaryotic cell is selected from the group consisting of a plant cell, a fungal cell, a mammalian cell, a reptile cell, an insect cell, an avian cell, a fish cell, a parasite cell, an arthropod cell, a cell of an invertebrate, a cell of a vertebrate, a rodent cell, a mouse cell, a rat cell, a primate cell, a non-human primate cell, and a human cell.

[0582] Embodiment 118. The cell of 117, wherein the eukaryotic cell is a human cell.

[0583] Embodiment 119. The cell of 118, wherein the cell is a cell of the central nervous system (CNS) or peripheral nervous system (PNS).

[0584] Embodiment 120. The cell of 119, wherein the cell is a neuron.

[0585] Embodiment 121. The cell of 120, wherein the neuron is a spinal motor neuron.

[0586] Embodiment 122. The cell of 119, wherein the cell is a glial cell, an oligodendrocyte, or a Schwann cell.

[0587] Embodiment 123. The cell of any one of 101 to 122, wherein the SOD1 gene to be modified encodes a SOD1 polypeptide comprising one or more mutations selected from Table 1 or mutations that disrupt the function of the SOD1 polypeptide.

[0588] Embodiment 124. The cell of any one of 101 to 122, wherein the SOD1 gene or the SOD1 regulatory element comprises a wild type sequence.

[0589] Embodiment 125. The cell of any one of 101-122, wherein the one or more mutations is a gain of function mutation.

[0590] Embodiment 126. The cell of any one of 101-122, wherein the one or more mutations is a loss of function mutation.

[0591] Embodiment 127. The cell of any one of 101-122, wherein the SOD1 gene encodes a SOD1 polypeptide comprising a mutation at residue position 4, position 90, and/or residue position 93, corresponding to the SOD1 polypeptide of SEQ ID NO: 100.

[0592] Embodiment 128. The cell of 127, wherein the SOD1 gene encoding the SOD1 polypeptide comprises an A4V mutation, a D90A mutation, a G93A mutation, or a combination thereof.

[0593] Embodiment 129. A method of treating a SOD1 or related disorder in a subject in need thereof, comprising administering to the subject a plurality of cells of any one of the of 101-128.

[0594] Embodiment 130. The method of 129 wherein the SOD1-related disorder is amyotrophic lateral sclerosis (ALS).

[0595] Embodiment 131. The method of 129 wherein the SOD1-related disorder is a neuropathy.

[0596] Embodiment 132. The method of any one of 129 to 131, wherein the cells are allogeneic.

[0597] Embodiment 133. The method of any one of 129 to 131, wherein the cells are autologous.

[0598] Embodiment 134. The method of any one of 129 to 131, wherein the cells are part of a cell line.

[0599] Embodiment 135. The method of any one of 129 to 134, wherein the cells are administered by a route selected from the group consisting of intraparenchymal, intravenous, intra-arterial, intracerebroventricular, intracisternal, intrathecal, intracranial, and intraperitoneal routes.

[0600] Embodiment 136. A method of treating a SOD1 or related disorder in a subject in need thereof, comprising modifying a SOD1 gene and/or a SOD1 regulatory element having one or more mutations in a cell of the subject, the modifying comprising either;
[0601] a) administering to the subject a CasX protein and a guide nucleic acid (gNA) comprising a targeting sequence; or
[0602] b) administering to the subject one or more nucleic acids encoding a CasX protein and a gNA comprising a targeting sequence, wherein the targeting sequence of the gNA has a sequence complementary to the SOD1 gene and/or the SOD1 regulatory element having the one or more mutations.

[0603] Embodiment 137. The method of 136, wherein the targeting sequence of the gNA comprises a sequence having at least about 65%, at least about 75%, at least about 85%, or at least about 95% identity to a sequence provided in Table 3.

[0604] Embodiment 138. The method of 136 or 137, wherein the one or more nucleic acids encoding the CasX protein and the gNA are capable of being expressed in a cell.

[0605] Embodiment 139. The method of any one of 136-138, wherein the CasX polypeptide and the gNA are associated together in a ribonuclear protein complex (RNP).

[0606] Embodiment 140. The method of any one of 136-139, wherein the subject is selected from the group consisting of mouse, rat, non-human primate, and human.

[0607] Embodiment 141. The method of 136-140139, wherein the subject is a human.

[0608] Embodiment 142. The method of any one of 136-141, wherein the cell is a cell of the central nervous system (CNS) or peripheral nervous system (PNS).

[0609] Embodiment 143. The method of 142, wherein the cell is a neuron.

[0610] Embodiment 144. The method of 143, wherein the neuron is a spinal motor neuron.

[0611] Embodiment 145. The method of 144, wherein the cell is a glial cell, an oligodendrocyte, or a Schwann cell.

[0612] Embodiment 146. The method any one of 136 to 145, wherein the method comprises modifying an allele of the SOD1 gene and/or the SOD1 regulatory element in the cell.

[0613] Embodiment 147. The method of any one of 136 to 146, wherein the method comprises administering to the subject the CasX protein and gNA, or the one or more nucleic acids encoding the CasX protein and gNA, via an administration route selected from the group consisting of intraparenchymal, intravenous, intra-arterial, intracerebroventricular, intracisternal, intrathecal, intracranial, and intraperitoneal routes.

[0614] Embodiment 148. The method of any one of 136-147, wherein the CasX protein is selected from the CasX proteins provided in SEQ ID Nos: 1-3 or Table 4, or sequence proteins having at least about 50%, at least about 60%, at least about 70%, at least about 80%, or at least about 90%, or at least about 95%, or at least about 99% sequence identity to the CasX proteins of SEQ ID NOS:1-3 or the sequences of Table 4.

[0615] Embodiment 149. The method of any one of 136-148, wherein the CasX protein has binding affinity for a PAM sequence selected from the group consisting of TTC, ATC, GTC, and CTC.

[0616] Embodiment 150. The method of any one of 136-149, wherein the CasX protein comprises nickase activity.

[0617] Embodiment 151. The method of any one of 136-150, wherein the CasX protein introduces a single-stranded break in the target nucleic acid, and wherein modification of the SOD1 gene and/or the SOD1 regulatory element comprises a mutation, an insertion, or a deletion.

[0618] Embodiment 152. The method of any one of 136-149, wherein the CasX protein introduces a double-stranded break in the target nucleic acid, and wherein the modified SOD1 gene and/or the SOD1 regulatory element comprises a mutation, an insertion, or a deletion.

[0619] Embodiment 153. The method of any one of 136-152, wherein the modified SOD1 gene comprises an insertion.

[0620] Embodiment 154. The method of any one of 136-152, wherein the modified SOD1 gene comprises a deletion.

[0621] Embodiment 155. The method of any one of 136-149, wherein the CasX protein is a catalytically inactive CasX (dCasX) protein.

[0622] Embodiment 156. The method of 155, wherein the dCasX comprises a mutation at residues:
[0623] a) D672, E769, and/or D935 corresponding to the CasX protein of SEQ ID NO: 1; or
[0624] b) D659, E756 and/or D922 of SEQ ID NO: 2.

[0625] Embodiment 157. The method of 156, wherein the mutation is a substitution of alanine for the residue.

[0626] Embodiment 158. The method of any one of 136 to 157, wherein the SOD1 gene and/or the SOD1 regulatory element comprises a DNA sequence encoding a sequence having at least about 65%, at least about 75%, at least about 85%, or at least about 95% sequence identity to a sequence selected from Table 3.

[0627] Embodiment 159. The method of any one of 136-157, wherein the targeting sequence of the gNA comprises a sequence having one or more single nucleotide polymorphisms (SNP) relative to a sequence provided in Table 3.

[0628] Embodiment 160. The method of 158 or 159, wherein the targeting sequence encodes a mutation of the SOD1 polypeptide of SEQ ID NO:100 selected from the group of amino acid substitutions consisting of A4S, A4T, A4V, C6F, V7E, L8Q, L8V, G12R, V14G, V14M, G16S, F20C, E21G, E21K, Q22L, G37R, L38R, L38V, G41D, G41S, H43R, F45C, H46R, H48Q, H48R, E49K, T54R, N65S, L67P, L67R, G72S, D76Y, H80A, L84F, L84V, G85R, N86S, V87A, A89T, A89V, D90A, D90V, G93A, G93C, G93D, G93R, G93V, A95G, V97M, E100G, E100K, D101G, D101N, 1104F, S105L, L106V, G108V, C111Y, I112M, I112T, I113T, G114A, R115G, V118L, D124G, D124V, D125H, L126S, S134N, N139K, L144F, L144S, A145T, C146R, G147R, V148G, V1481, 1149T, I151T, and mutations that disrupt the function or expression of the SOD1 polypeptide.

[0629] Embodiment 161. The method of any one of 136 to 157, wherein the SOD1 gene and/or the SOD1 regulatory element comprises a wild type sequence.

[0630] Embodiment 162. The method of any one of 136-160, wherein the mutation of the SOD1 gene and/or the SOD1 regulatory element is a gain of function mutation.

[0631] Embodiment 163. The method of any one of 136-160, wherein the mutation of the SOD1 gene and/or the SOD1 regulatory element is a loss of function mutation.

[0632] Embodiment 164. The method of any one of 136-160, wherein the SOD1 gene encodes a SOD1 polypeptide comprising a mutation selected from the mutations provided in Table 1 or mutations that disrupt the function of the SOD1 polypeptide.

[0633] Embodiment 165. The method of 164, wherein the SOD1 gene encodes a SOD1 polypeptide comprising an A4V mutation, a D90A mutation, and/or a G93A mutation of the sequence of SEQ ID NO:100.

[0634] Embodiment 166. The method of any one of 136-165, wherein the gNA is chemically modified.

[0635] Embodiment 167. The method of any one of 136-166, wherein the targeting sequence of the gNA has a sequence of a SOD1 exon or a sequence that is complementary to a SOD1 exon.

[0636] Embodiment 168. The method any one of 136-166, wherein the targeting sequence of the gNA has a sequence of a SOD1 intron or a sequence that is complementary to a SOD1 intron.

[0637] Embodiment 169. The method of any one of 136-166, wherein the targeting sequence of the gNA has a sequence of a SOD1 intron-exon junction or a sequence that is complementary to a SOD1 intron-exon junction.

[0638] Embodiment 170. The method any one of 136-166, wherein the targeting sequence of the gNA has a sequence with one or more single nucleotide polymorphisms of the SOD1 gene and/or SOD1 regulatory element, or a sequence that is complementary to one or more single nucleotide polymorphisms (SNP) of the SOD1 gene and/or SOD1 regulatory element.

[0639] Embodiment 171. The method of any one of 136-166, wherein the SOD1 gene and/or SOD1 regulatory element is a wild type sequence.

[0640] Embodiment 172. The method of any one of 136-171, wherein the targeting sequence of the gNA has a sequence that is complementary to an intergenic region of the SOD1 gene.

[0641] Embodiment 173. The method of any one of 136 to 166, wherein the targeting sequence of the gNA has a sequence that is complementary to a SOD1 regulatory element.

[0642] Embodiment 174. The method of 173, wherein the SOD1 regulatory element is 5′ of the SOD1 gene.

[0643] Embodiment 175. The method of 173, wherein the SOD1 regulatory element is 3′ of the SOD1 gene.

[0644] Embodiment 176. The method of 173, wherein the SOD1 regulatory element comprises the 5′ untranslated region (UTR) of the SOD1 gene.

[0645] Embodiment 177. The method of 173, wherein the SOD1 regulatory element comprises the 3′UTR of the SOD1 gene.

[0646] Embodiment 178. The method of 173, wherein the SOD1 regulatory element comprises a promoter.

[0647] Embodiment 179. The method of 173, wherein the SOD1 regulatory element comprises an enhancer.

[0648] Embodiment 180. The method of any one of 136 to 179, wherein the targeting sequence of the gNA has a sequence that hybridizes with the SOD1 gene and/or the SOD1 regulatory element.

[0649] Embodiment 181. The method of any one of 136 to 180, wherein the modifying comprises introducing a single-stranded break in the target nucleic acid wherein modification of the SOD1 gene and/or the SOD1 regulatory element comprises a mutation, an insertion, or a deletion.

[0650] Embodiment 182. The method of any one of 136 to 180, wherein the modifying comprises introducing a double-stranded break in the target nucleic acid, wherein the modified SOD1 gene and/or the SOD1 regulatory element comprises a mutation, an insertion, or a deletion.

[0651] Embodiment 183. The method of any one of 136 to 182, wherein the method further comprises administering a donor template comprising at least a portion of a SOD1 gene, wherein the SOD-1 gene portion is selected from a SOD1 exon, a SOD1 intron, a SOD1 intron-exon junction, a SOD1 regulatory element, and wherein the SOD-1 gene portion is inserted into or replaces the target nucleic acid.

[0652] Embodiment 184. The method of 183, wherein the donor DNA template ranges in size from 10-10,000 nucleotides.

[0653] Embodiment 185. The method of 183 or 184, wherein the donor template is a single-stranded RNA or DNA template.

[0654] Embodiment 186. The method of 183 or 184, wherein the donor template is a double-stranded DNA template.

[0655] Embodiment 187. The method of any one of 136 to 186, wherein the SOD1 gene is a wild-type gene.

[0656] Embodiment 188. The method of any one of 136 to 187, wherein the method comprises contacting the target nucleic acid of the cell with a CasX protein and a gNA.

[0657] Embodiment 189. The method of 188, wherein the method comprises contacting the target nucleic acid of the cell with a pre-complexed CasX protein-gNA.

[0658] Embodiment 190. The method of 188, wherein the method comprises contacting the cell acid with a liposome or lipid nanoparticle comprising the CasX protein and the gNA.

[0659] Embodiment 191. The method of any one of 136 to 190, wherein the method comprises contacting the cell with the one or more nucleic acids encoding the CasX protein and the gNA, and optionally the donor template.

[0660] Embodiment 192. The method of 191, wherein the one or more nucleic encoding the CasX protein further comprise one or more nuclear localization signals (NLSs).

[0661] Embodiment 193. The method of 192, wherein the one or more NLS are selected from the sequences PKKKRKV (SEQ ID NO: 145), KRPAATKKAGQAKKKK (SEQ ID NO: 146), PAAKRVKLD (SEQ ID NO: 147), RQRRNELKRSP (SEQ ID NO: 148), NQSSNFGPMKGGNFGGRSSGPYGGGGQYFAKPRNQGGY (SEQ ID NO: 149), RMRIZFKNKGKDTAELRRRRVEVSVELRKAKKDEQILKRRNV (SEQ ID NO: 150), VSRKRPRP (SEQ ID NO: 151), PPKKARED (SEQ ID NO: 152), PQPKKKPL (SEQ ID NO: 153), SALIKKKKKMAP (SEQ ID NO: 154), DRLRR (SEQ ID NO: 155), PKQKKRK (SEQ ID NO: 156), RKLKKKIKKL (SEQ ID NO: 157), REKKKFLKRR (SEQ ID NO: 158), KRKGDEVDGVDEVAKKKSKK (SEQ ID NO: 159), RKCLQAGMNLEARKTKK (SEQ ID NO: 160), PRPRKIPR (SEQ ID NO: 161), PPRKKRTVV (SEQ ID NO: 162), NLSKKKKRKREK (SEQ ID NO: 163), RRPSRPFRKP (SEQ ID NO: 164), KRPRSPSS (SEQ ID NO: 165), KRGINDRNFWRGENERKTR (SEQ ID NO: 166), PRPPKMARYDN (SEQ ID NO: 167), KRSFSKAF (SEQ ID NO: 168), KLKIKRPVK (SEQ ID NO: 169), PKTRRRPRRSQRKRPPT (SEQ ID NO: 171), RRKKRRPRRKKRR (SEQ ID NO: 174), PKKKSRKPKKKSRK (SEQ ID NO: 175), HKKKHPDASVNFSEFSK (SEQ ID NO: 176), QRPGPYDRPQRPGPYDRP (SEQ ID NO: 177), LSPSLSPLLSPSLSPL (SEQ ID NO: 178), RGKGGKGLGKGGAKRHRK (SEQ ID NO: 179), PKRGRGRPKRGRGR (SEQ ID NO: 180), and MSRRRKANPTKLSENAKKLAKEVEN (SEQ ID NO: 205).

[0662] Embodiment 194. The method of 192, wherein the one or more NLSs are expressed at the C-terminus of the CasX protein.

[0663] Embodiment 195. The method of 192, wherein the one or more NLSs are expressed at the N-terminus of the CasX protein.

[0664] Embodiment 196. The method of 192, wherein the one or more NLSs are expressed at the N-terminus and C-terminus of the CasX protein.

[0665] Embodiment 197. The method of any one of 191 to 196, wherein the one or more nucleic acids encoding the CasX protein are codon optimized for expression in a eukaryotic cell.

[0666] Embodiment 198. The method of any one of 136 to 197, wherein the method comprises contacting the cell with a vector encoding the CasX protein and the gNA, the vector optionally further encoding the donor template.

[0667] Embodiment 199. The method of 198, wherein the vector is an AAV vector.

[0668] Embodiment 200. The vector of 199, wherein the AAV vector is selected from AAV1, AAV2, AAV3, AAV4, AAV5, AAV6, AAV7, AAV8, AAV9, AAV10, AAV-Rh74, or AAVRh10.

[0669] Embodiment 201. The method of 198, wherein the vector is a lentiviral vector.

[0670] Embodiment 202. The method of any one of 136 to 200, comprising further contacting the cell with an additional CRISPR protein, or a nucleic acid encoding the additional CRISPR protein.

[0671] Embodiment 203. The method of 202, wherein the additional CRISPR protein has a sequence different from the CasX protein of any of the preceding embodiments.

[0672] Embodiment 204. The method of 202, wherein the additional CRISPR protein is not a CasX protein.

[0673] Embodiment 205. The method of any one of 136 to 204, wherein the gNA is a single-molecule gNA (sgNA).

[0674] Embodiment 206. The method of any one of 136 to 204, wherein the gNA is a dual-molecule gNA (dgNA).

[0675] Embodiment 207. The method of any one of 136 to 206, comprising contacting the target nucleic acid with a plurality of gNAs targeted to the SOD1 gene and/or the SOD1 regulatory element.

[0676] Embodiment 208. The method of any one of 136 to 207, wherein the SOD1-related disorder is ALS.

[0677] Embodiment 209. The method of any one of 136 to 207, wherein the SOD1-related disorder is a neuropathy.

[0678] Embodiment 210. A CasX/gNA system comprising at least one CasX protein selected from those provided in SEQ ID NOs: 1-3 or Table 4 or sequences having at least about 50%, at least about 60%, at least about 70%, at least about 80%, or at least about 90%, or at least about 95%, or at least about 99% sequence identity to the CasX proteins of SEQ ID NOS:1-3 or Table 4 and at least one gRNA with a targeting sequence wherein the targeting sequence has a sequence that is complementary to a SOD1 gene and/or a SOD1 regulatory element, or polynucleotides encoding the same.

[0679] Embodiment 211. A CasX/gNA system comprising at least a CasX protein and at least one gNA with a targeting sequence wherein the targeting sequence has a sequence that is complementary to a SOD1 gene and/or a SOD1 regulatory element and wherein the targeting sequence of the gNA comprises a sequence having at least about 65%, at least about 75%, at least about 85%, or at least about 95% identity to a sequence provided in Table 3, or polynucleotides encoding the same.

[0680] Embodiment 212. The CasX/gNA system of 211, wherein the targeting sequence of the gNA comprises a sequence having one or more single nucleotide polymorphisms (SNP) relative to a sequence provided in Table 3.

[0681] Embodiment 213. The method of 211 or 212, wherein the targeting sequence encodes a mutation of the SOD1 polypeptide of SEQ ID NO:100 selected from the group of amino acid substitutions consisting of A4S, A4T, A4V, C6F, V7E, L8Q, L8V, G12R, V14G, V14M, G16S, F20C, E21G, E21K, Q22L, G37R, L38R, L38V, G41D, G41S, H43R, F45C, H46R, H48Q, H48R, E49K, T54R, N65S, L67P, L67R, G72S, D76Y, H80A, L84F, L84V, G85R, N86S, V87A, A89T, A89V, D90A, D90V, G93A, G93C, G93D, G93R, G93V, A95G, V97M, E100G, E100K, D101G, D101N, 1104F, S105L, L106V, G108V, C111Y, I112M, I112T, I113T, G114A, R115G, V118L, D124G, D124V, D125H, L126S, S134N, N139K, L144F, L144S, A145T, C146R, G147R, V148G, V1481, 1149T, I151T, and mutations that disrupt the function or expression of the SOD1 polypeptide.

[0682] Embodiment 214. A CasX/gNA system comprising:
[0683] a) a CasX polypeptide and a gNA;
[0684] b) a CasX polypeptide, a gNA, and a donor template;
[0685] c) a CasX fusion polypeptide comprising a heterologous polypeptide and a gNA;
[0686] d) a CasX fusion polypeptide comprising a heterologous polypeptide, a gNA, and a donor template;
[0687] e) a vector comprising: i) a nucleotide sequence encoding a CasX polypeptide; and ii) a nucleotide sequence encoding a gNA;
[0688] f) a vector comprising: i) a nucleotide sequence encoding a CasX polypeptide; ii) a nucleotide sequence encoding a gNA; and iii) a donor template;
[0689] g) a vector comprising: i) a nucleotide sequence encoding a CasX fusion polypeptide comprising a heterologous polypeptide; and ii) a nucleotide sequence encoding a gNA; or
[0690] h) a vector comprising: i) a nucleotide sequence encoding a CasX fusion polypeptide comprising a heterologous polypeptide; ii) a nucleotide sequence encoding a gNA; and a donor template.

[0691] Embodiment 215. The system of 214, wherein the CasX protein is selected from those provided in SEQ ID NOS: 1-3 or Table 4 or sequences having at least about 50%, at least about 60%, at least about 70%, at least about 80%, or at least about 90%, or at least about 95%, or at least about 99% sequence identity to the CasX proteins of SEQ ID NOS:1-3 or Table 4 and the gRNA targeting sequence has a sequence that is complementary to a SOD1 gene and/or a SOD1 regulatory element.

[0692] Embodiment 216. The system of 214 or 215, wherein the CasX polypeptide and the gNA are associated together in a ribonuclear protein complex (RNP).

[0693] Embodiment 217. The system of any one of 214-216, wherein the donor template comprises at least a portion of a SOD1 gene, wherein the SOD1 gene portion is selected from the group consisting of a SOD1 exon, a SOD1 intron, a SOD1 intron-exon junction, and a SOD1 regulatory element.

[0694] Embodiment 218. The system of any one of 214-216, wherein the donor template is a single stranded DNA template or a single stranded RNA template.

[0695] Embodiment 219. The method of any one of 214-216, wherein the donor template is a double stranded DNA template.

[0696] Embodiment 220. The system of any one of 214-219, wherein the heterologous polypeptide inhibits transcription, modifies a target nucleic acid, or modifies a polypeptide associated with a nucleic acid.

[0697] Embodiment 221. The system of any one of 214-220, wherein vector is an Adeno-Associated Viral (AAV) vector.

[0698] Embodiment 222. The system of 221, wherein the AAV is AV1, AAV2, AAV3, AAV4, AAV5, AAV6, AAV7, AAV8, AAV9, AAV10, AAV-Rh74, or AAVRh10.

[0699] Embodiment 223. A polynucleotide encoding a gNA comprising a targeting sequence, wherein the targeting sequence has a sequence that is complementary to a SOD1 gene and/or a SOD1 regulatory element, wherein the gNA is capable of binding to a CasX protein.

[0700] Embodiment 224. A polynucleotide encoding a gNA targeting sequence, wherein the targeting sequence of the gNA comprises a sequence having at least about 65%, at least about 75%, at least about 85%, or at least about 95% identity to a sequence provided in Table 3.

[0701] Embodiment 225. The polynucleotide of 224, wherein the targeting sequence of the gNA comprises a sequence having one or more single nucleotide polymorphisms (SNP) relative to a sequence provided in Table 3.

[0702] Embodiment 226. The polynucleotide of 224 or 225, wherein the targeting sequence encodes a mutation of the SOD1 polypeptide of SEQ ID NO:100 selected from the group consisting of amino acid substitutions consisting of A4S, A4T, A4V, C6F, V7E, L8Q, L8V, G12R, V14G, V14M, G16S, F20C, E21G, E21K, Q22L, G37R, L38R, L38V, G41D, G41S, H43R, F45C, H46R, H48Q, H48R, E49K, T54R, N65S, L67P, L67R, G72S, D76Y, H80A, L84F, L84V, G85R, N86S, V87A, A89T, A89V, D90A, D90V, G93A, G93C, G93D, G93R, G93V, A95G, V97M, E100G, E100K, D101G, D101N, 1104F, S105L, L106V, G108V, C111Y, I112M, I112T, I113T, G114A, R115G, V118L, D124G, D124V, D125H, L126S, S134N, N139K, L144F, L144S, A145T, C146R, G147R, V148G, V1481, 1149T, I151T and mutations that disrupt the function or expression of the SOD1 polypeptide.

[0703] Embodiment 227. The polynucleotide of 223 or 224, wherein the polynucleotide further encodes a CasX protein.

[0704] Embodiment 228. The polynucleotide of any one of 223-227, wherein the polynucleotide is a DNA.

[0705] Embodiment 229. A vector comprising any of the polynucleotides of 223-228.

[0706] Embodiment 230. The vector of 229, wherein the vector is a viral vector.

[0707] Embodiment 231. The vector of 229, wherein the vector is a lentiviral vector.

[0708] Embodiment 232. The vector of 229, wherein the vector is an AAV vector.

[0709] Embodiment 233. The vector of 232, wherein the AAV vector is AV1, AAV2, AAV3, AAV4, AAV5, AAV6, AAV7, AAV8, AAV9, AAV10, AAV-Rh74, or AAVRh10.

[0710] Embodiment 234. A cell comprising the polynucleotide or vector of any one of 223-233.

### Set 2

[0711] Embodiment 1. A CasX:gNA system comprising a CasX protein and a guide nucleic acid (gNA), wherein the gNA comprises a targeting sequence complementary to a target nucleic acid sequence comprising a superoxide dismutase 1 (SOD1) gene.

[0712] Embodiment 2. The CasX:gNA system of 1, wherein the SOD1 gene comprises one or more mutations in the sequence of the SOD1 gene encoding the SOD1 protein.

[0713] Embodiment 3. The CasX:gNA system of 1 or 2, wherein the SOD1 gene comprises one or more mutations in the sequence of the SOD1 gene encoding the regulatory region.

[0714] Embodiment 4. The CasX:gNA system of 1, wherein the SOD1 gene comprises a wild-type sequence in the sequence encoding the SOD1 protein or the regulatory region.

[0715] Embodiment 5. The CasX:gNA system of 4, wherein the wild-type sequence comprises a nucleic acid encoding all or a portion of SEQ ID NO:100, or comprises a nucleic acid sequence that spans all or a portion of bp 31,659,622 to bp 31,668,931 of chromosome 21 of human genome GRCh38/hg38.

[0716] Embodiment 6. The CasX:gNA system of 2 or 3, wherein the mutation is an insertion, deletion, substitution, duplication, or inversion of one or more nucleotides as compared to the wild-type sequence.

[0717] Embodiment 7. The CasX:gNA system of any one of 2, 3, or 6, wherein the mutation is a gain of function mutation.

[0718] Embodiment 8. The CasX:gNA system of any one of 2, 3, or 6, wherein the mutation is a loss of function mutation.

[0719] Embodiment 9. The CasX:gNA system of any one of 2, 3, or 6-8, wherein the SOD1 gene encodes a protein comprising a mutation selected from mutations set forth in Table 1 or comprises one or more mutations that disrupt the function of the SOD1 protein.

[0720] Embodiment 10. The CasX:gNA system any one of 2, 3, or 6-9, wherein the SOD1 gene encodes a protein comprising a mutation selected from the group of amino acid substitutions of SEQ ID NO:100 consisting of A4S, A4T, A4V, C6F, V7E, L8Q, L8V, G12R, V14G, V14M, G16S, F20C, E21G, E21K, Q22L, G37R, L38R, L38V, G41D, G41S, H43R, F45C, H46R, H48Q, H48R, E49K, T54R, N65S, L67P, L67R, G72S, D76Y, H80A, L84F, L84V, G85R, N86S, V87A, A89T, A89V, D90A, D90V, G93A, G93C, G93D, G93R, G93V, A95G, V97M, E100G, E100K, D101G, D101N, 1104F, S105L, L106V, G108V, C111Y, I112M, I112T, I113T, G114A, R115G, V118L, D124G, D124V, D125H, L126S, S134N, N139K, L144F, L144S, A145T, C146R, G147R, V148G, V1481, 1149T, I151T and one or more amino acid substitutions of SEQ ID NO:100 that disrupt a function or expression of the SOD1 protein, or is selected from a combination thereof.

[0721] Embodiment 11. The CasX:gNA system of 10, wherein the SOD1 gene encodes a protein comprising a mutation selected from an A4V mutation of SEQ ID NO:100, a D90A mutation of SEQ ID NO:100, a G93A mutation of SEQ ID NO:100, or a combination thereof.

[0722] Embodiment 12. The CasX:gNA system of any one 1-11, wherein the gNA is a guide RNA (gRNA).

[0723] Embodiment 13. The CasX:gNA system of any one of 1-11, wherein the gNA is a guide DNA (gDNA).

[0724] Embodiment 14. The CasX:gNA system of any one of 1-11, wherein the gNA is a chimera comprising DNA and RNA.

[0725] Embodiment 15. The CasX:gNA system of any one 1-14, wherein the gNA is a single-molecule gNA (sgNA).

[0726] Embodiment 16. The CasX:gNA system of any one of 1-14, wherein the gNA is a dual-molecule gNA (dgNA).

[0727] Embodiment 17. The CasX:gNA system of any one 1-16, wherein the targeting sequence of the gNA comprises a sequence selected from the group consisting of the sequences set forth in Table 3.

[0728] Embodiment 18. The CasX:gNA system of any one of 1-16, wherein the targeting sequence of the gNA comprises a sequence a sequence of Table 3 with a single nucleotide removed from the 3′ end of the sequence.

[0729] Embodiment 19. The CasX:gNA system of any one of 1-16, wherein the targeting sequence of the gNA comprises a sequence a sequence of Table 3 with two nucleotides removed from the 3′ end of the sequence.

[0730] Embodiment 20. The CasX:gNA system of any one of 1-16, wherein the targeting sequence of the gNA comprises a sequence a sequence of Table 3 with three nucleotides removed from the 3′ end of the sequence.

[0731] Embodiment 21. The CasX:gNA system of any one of 1-16, wherein the targeting sequence of the gNA comprises a sequence a sequence of Table 3 with four nucleotides removed from the 3′ end of the sequence.

[0732] Embodiment 22. The CasX:gNA system of any one of 1-16, wherein the targeting sequence of the gNA comprises a sequence a sequence of Table 3 with five nucleotides removed from the 3′ end of the sequence.

[0733] Embodiment 23. The CasX:gNA system of any one of 1-22, wherein the targeting sequence of the gNA is complementary to a sequence of a SOD1 exon or a sequence complementary to a SOD1 exon.

[0734] Embodiment 24. The CasX:gNA system of any one of 1-22, wherein the targeting sequence of the gNA is complementary to a sequence of a SOD1 intron or a sequence complementary to a SOD1 intron.

[0735] Embodiment 25. The CasX:gNA system of any one of 1-22, wherein the targeting sequence of the gNA is complementary to a sequence of a SOD1 intron-exon junction or a sequence complementary to a SOD1 intron-exon junction.

[0736] Embodiment 26. The CasX:gNA system of any one of 1-22, wherein the targeting sequence of the gNA is complementary to a sequence comprising one or more single nucleotide polymorphisms (SNPs) of the SOD1 gene.

[0737] Embodiment 27. The CasX:gNA system of any one of 1-22, wherein the targeting sequence of the gNA is complementary to a sequence of an intergenic region of the SOD1 gene.

[0738] Embodiment 28. The CasX:gNA system of any one of 1-22, wherein the targeting sequence of the gNA comprises a DNA sequence having at least about 65%, at least about 75%, at least about 85%, or at least about 95% identity to a sequence selected from the group consisting of sequences set forth in Table 3.

[0739] Embodiment 29. The CasX:gNA system of any one of 1-22, wherein the targeting sequence of the gNA comprises a DNA sequence having one or more single nucleotide polymorphisms (SNP) relative to a sequence set forth in Table 3.

[0740] Embodiment 30. The CasX:gNA system of any one of 1-17, wherein the targeting sequence of the gNA consists of a sequence selected from the group consisting of sequences set forth in Table 3.

[0741] Embodiment 31. The CasX:gNA system of any one of 1-16, wherein the targeting sequence is complementary to a nucleic acid sequence encoding a mutation of the SOD1 protein of SEQ ID NO:100 selected from the group of amino acid substitutions consisting of A4S, A4T, A4V, C6F, V7E, L8Q, L8V, G12R, V14G, V14M, G16S, F20C, E21G, E21K, Q22L, G37R, L38R, L38V, G41D, G41S, H43R, F45C, H46R, H48Q, H48R, E49K, T54R, N65S, L67P, L67R, G72S, D76Y, H80A, L84F, L84V, G85R, N86S, V87A, A89T, A89V, D90A, D90V, G93A, G93C, G93D, G93R, G93V, A95G, V97M, E100G, E100K, D101G, D101N, I104F, S105L, L106V, G108V, C111Y, I112M, 1112T, I113T, G114A, R115G, V118L, D124G, D124V, D125H, L126S, S134N, N139K, L144F, L144S, A145T, C146R, G147R, V148G, V1481, 1149T, I151T, and one or more amino acid substitutions of SEQ ID NO:100 that disrupt the function or expression of the SOD1 protein.

[0742] Embodiment 32. The CasX:gNA system of any one of 1-31, further comprising a second gNA, wherein the second gNA has a targeting sequence complementary a different or overlapping portion of the target nucleic acid compared to the targeting sequence of the gNA of any one of the preceding.

[0743] Embodiment 33. The CasX:gNA system of any one of 1-32, wherein the gNA has a scaffold comprising a sequence having at least about 50%, at least about 60%, at least about 70%, at least about 80%, at least about 90%, at least about 95%, at least about 96%, at least about 97%, at least about 98%, at least about 99%, or 100% sequence identity to a sequence selected from the group consisting of sequences set forth in Table 2A or 2B.

[0744] Embodiment 34. The CasX:gNA system of 33, wherein the gNA scaffold comprises a sequence having at least one modification relative to a reference gNA sequence selected from the group consisting of SEQ ID NOS: 4-16 of Table 2A.

[0745] Embodiment 35. The CasX:gNA system of 34, wherein the at least one modification of the reference gNA comprises at least one substitution, deletion, or substitution of a nucleotide of the gNA sequence.

[0746] Embodiment 36. The CasX:gNA system of any one of 1-35, wherein the gNA is chemically modified.

[0747] Embodiment 37. The CasX:gNA system of any one of 1-36, wherein the CasX protein comprises a reference CasX protein having a sequence of any one of SEQ ID NOS: 1-3 or a CasX variant protein having a sequence of Table 4, or a sequence having at least about 50%, at least about 60%, at least about 70%, at least about 80%, at least about 90%, or at least about 95%, or at least about 95%, or at least about 96%, or at least about 97%, or at least about 98%, or at least about 99% sequence identity thereto.

[0748] Embodiment 38. The CasX:gNA system of 37, wherein the CasX protein has binding affinity for a protospacer adjacent motif (PAM) sequence selected from the group consisting of TTC, ATC, GTC, and CTC.

[0749] Embodiment 39. The CasX:gNA system of 37 or 38, wherein the CasX variant protein comprises at least one modification relative to a reference CasX protein having a sequence selected from SEQ ID NOS:1-3.

[0750] Embodiment 40. The CasX:gNA system of 39, wherein the at least one modification comprises at least one amino acid substitution, deletion, or substitution in a domain of the CasX variant protein relative to the reference CasX protein.

[0751] Embodiment 41. The CasX:gNA system of 40, wherein the domain is selected from the group consisting of a non-target strand binding (NTSB) domain, a target strand loading (TSL) domain, a helical I domain, a helical II domain, an oligonucleotide binding domain (OBD), and a RuvC DNA cleavage domain.

[0752] Embodiment 42. The CasX:gNA system of any one of 37-41, wherein the CasX protein further comprises one or more nuclear localization signals (NLS).

[0753] Embodiment 43. The CasX:gNA system of 42, wherein the one or more NLS are selected from the sequences PKKKRKV (SEQ ID NO: 145), KRPAATKKAGQAKKKK (SEQ ID NO: 146), PAAKRVKLD (SEQ ID NO: 147), RQRRNELKRSP (SEQ ID NO: 148), NQSSNFGPMKGGNFGGRSSGPYGGGGQYFAKPRNQGGY (SEQ ID NO: 149), RMRIZFKNKGKDTAELRRRRVEVSVELRKAKKDEQILKRRNV (SEQ ID NO: 150), VSRKRPRP (SEQ ID NO: 151), PPKKARED (SEQ ID NO: 152), PQPKKKPL (SEQ ID NO: 153), SALIKKKKKMAP (SEQ ID NO: 154), DRLRR (SEQ ID NO: 155), PKQKKRK (SEQ ID NO: 156), RKLKKKIKKL (SEQ ID NO: 157), REKKKFLKRR (SEQ ID NO: 158), KRKGDEVDGVDEVAKKKSKK (SEQ ID NO: 159), RKCLQAGMNLEARKTKK (SEQ ID NO: 160), PRPRKIPR (SEQ ID NO: 161), PPRKKRTVV (SEQ ID NO: 162), NLSKKKKRKREK (SEQ ID NO: 163), RRPSRPFRKP (SEQ ID NO: 164), KRPRSPSS (SEQ ID NO: 165), KRGINDRNFWRGENERKTR (SEQ ID NO: 166), PRPPKMARYDN (SEQ ID NO: 167), KRSFSKAF (SEQ ID NO: 168), KLKIKRPVK (SEQ ID NO: 169), PKTRRRPRRSQRKRPPT (SEQ ID NO: 171), RRKKRRPRRKKRR (SEQ ID NO: 174), PKKKSRKPKKKSRK (SEQ ID NO: 175), HKKKHPDASVNFSEFSK (SEQ ID NO: 176), QRPGPYDRPQRPGPYDRP (SEQ ID NO: 177), LSPSLSPLLSPSLSPL (SEQ ID NO: 178), RGKGGKGLGKGGAKRHRK (SEQ ID NO: 179), PKRGRGRPKRGRGR (SEQ ID NO: 180), and MSRRRKANPTKLSENAKKLAKEVEN (SEQ ID NO: 205).

[0754] Embodiment 44. The CasX:gNA system of 42 or 43, wherein the one or more NLS are expressed at the C-terminus of the CasX protein.

[0755] Embodiment 45. The CasX:gNA system of 42 or 43, wherein the one or more NLS are expressed at the N-terminus of the CasX protein.

[0756] Embodiment 46. The CasX:gNA system of 42 or 43, wherein the one or more NLS are expressed at the N-terminus and C-terminus of the CasX protein.

[0757] Embodiment 47. The CasX:gNA system of any one of 37-46, wherein the CasX variant protein exhibits at least one or more improved characteristics as compared to corresponding characteristics of a reference CasX protein.

[0758] Embodiment 48. The CasX:gNA system of 47, wherein the improved characteristic is selected from the group consisting of improved folding of the CasX protein, improved binding affinity of the CasX protein to the guide RNA, improved ribonuclear protein complex (RNP) formation, higher percentage of cleavage-competent RNP, improved binding affinity to the target nucleic acid, altered binding affinity to one or more PAM sequences, improved unwinding of the target nucleic acid, increased activity, increased target nucleic acid cleavage rate, improved editing efficiency, improved editing specificity, increased activity of the nuclease, increased target strand loading for double strand cleavage, decreased target strand loading for single strand nicking, decreased off-target cleavage, improved binding of the non-target strand of DNA, improved CasX protein stability, improved protein:guide RNA complex stability, improved protein solubility, improved protein:guide RNA complex solubility, improved protein yield, improved protein expression, and improved fusion characteristics.

[0759] Embodiment 49. The CasX:gNA system of 47 or 48, wherein the improved characteristic of the CasX variant protein is at least about 1.1 to about 100,000-fold improved relative to the characteristic of the reference CasX protein of SEQ ID NO: 1, SEQ ID NO: 2, or SEQ ID NO: 3.

[0760] Embodiment 50. The CasX:gNA system of 47 or 48, wherein the improved characteristic of the CasX variant protein is at least about 10-fold, at least about 100-fold, at least about 1,000-fold, or at least about 10,000-fold improved relative to the characteristics of the reference CasX protein of SEQ ID NO: 1, SEQ ID NO: 2, or SEQ ID NO: 3.

[0761] Embodiment 51. The CasX:gNA system of any one of 48-50, wherein the improved characteristic is improved binding affinity to the target nucleic acid.

[0762] Embodiment 52. The CasX:gNA system of any one of 48-50, wherein the improved characteristic is increased target nucleic acid cleavage rate.

[0763] Embodiment 53. The CasX:gNA system of any one of 48-50, wherein the improved characteristic is increased binding affinity to one or more PAM sequences wherein the one or more PAM sequences are selected from the group consisting of TTC, ATC, GTC, and CTC.

[0764] Embodiment 54. The CasX:gNA system of any one of 1-53, wherein the CasX protein and the gNA are associated together in an RNP.

[0765] Embodiment 55. The CasX:gNA system of 54, wherein the RNP comprising a CasX variant has a higher percentage of cleavage-competent RNP compared to an RNP of a reference CasX protein of SEQ ID NO: 1, SEQ ID NO: 2, or SEQ ID NO: 3 and the gNA.

[0766] Embodiment 56. The CasX:gNA system of any one of 41-55, wherein the CasX variant protein comprises a RuvC DNA cleavage domain having nickase activity.

[0767] Embodiment 57. The CasX:gNA system of any one of 41-55, wherein the CasX variant protein comprises a RuvC DNA cleavage domain having double-stranded cleavage activity.

[0768] Embodiment 58. The CasX:gNA system of any one of 1-46, wherein the CasX protein is a catalytically inactive CasX (dCasX) protein, and wherein the dCasX and the gNA retain the ability to bind to the target nucleic acid.

[0769] Embodiment 59. The CasX:gNA system of 58, wherein the dCasX comprises a mutation at residues:
[0770] a. D672, E769, and/or D935 corresponding to the CasX protein of SEQ ID NO:1; or
[0771] b. D659, E756 and/or D922 corresponding to the CasX protein of SEQ ID NO: 2.

[0772] Embodiment 60. The CasX:gNA system of 59, wherein the mutation is a substitution of alanine for the residue.

[0773] Embodiment 61. The CasX:gNA system of any one of 1-60, further comprising a donor template nucleic acid.

[0774] Embodiment 62. The CasX:gNA system of 61, wherein the donor template comprises a nucleic acid comprising at least a portion of a SOD1 gene coding the SOD1 protein or the SOD1 regulatory region, selected from the group consisting of a SOD1 exon, a SOD1 intron, and a SOD1 intron-exon junction.

[0775] Embodiment 63. The CasX:gNA system of 61 or 62, wherein the donor template ranges in size from 10-10,000 nucleotides.

[0776] Embodiment 64. The CasX:gNA system of any one of 61-63, wherein the donor template is a single-stranded DNA template or a single stranded RNA template.

[0777] Embodiment 65. The CasX:gNA system of any one of 61-63, wherein the donor template is a double-stranded DNA template.

[0778] Embodiment 66. A nucleic acid comprising a sequence that encodes the CasX:gNA system of any one of 1-65.

[0779] Embodiment 67. The nucleic acid of 66, wherein the nucleic acids encoding the CasX protein and gNA are codon optimized for expression in a eukaryotic cell.

[0780] Embodiment 68. A vector comprising the nucleic acid of 66 or 67.

[0781] Embodiment 69. A vector comprising a donor template, wherein the donor template comprises a nucleic acid comprising at least a portion of a SOD1 gene encoding the SOD1 protein or the SOD1 regulatory region

[0782] Embodiment 70. The vector of 69, further comprising the nucleic acid of 66 or 67.

[0783] Embodiment 71. The vector of any one of 68-70, wherein the vector further comprises a promoter.

[0784] Embodiment 72. The vector of any one of 68-70, wherein the vector is selected from the group consisting of a retroviral vector, a lentiviral vector, an adenoviral vector, an adeno-associated viral (AAV) vector, a herpes simplex virus (HSV) vector, a virus-like particle (VLP), a plasmid, a minicircle, a nanoplasmid, and an RNA vector.

[0785] Embodiment 73. The vector of 72, wherein the vector is an AAV vector.

[0786] Embodiment 74. The vector of 73, wherein the AAV vector is selected from AAV1, AAV2, AAV3, AAV4, AAV5, AAV6, AAV7, AAV8, AAV9, AAV10, AAV-Rh74, or AAVRh10.

[0787] Embodiment 75. The vector of 72, wherein the vector is a retroviral vector.

[0788] Embodiment 76. The vector of 72, wherein the vector encoding the VLP comprises one or more nucleic acids encoding a gag polyprotein, the CasX protein of any one of 37-57, and the gNA of any one of 1-36.

[0789] Embodiment 77. A virus-like particle (VLP) comprising the CasX protein of any one of 37-57, and the gNA of any one of 1-36.

[0790] Embodiment 78. The VLP of 77, wherein the CasX protein and the gNA are associated together in an RNP.

[0791] Embodiment 79. A method of modifying a SOD1 target nucleic acid, optionally comprising one or more mutations, the method comprising contacting the target nucleic acid with a CasX protein and a guide nucleic acid (gNA) comprising a targeting sequence wherein said contacting comprises introducing into a cell:
[0792] a. (i) the CasX protein of any one of 37-57 or a nucleic acid encoding the CasX protein; and (ii) the gNA of any one of 1-36, or a nucleic acid encoding the gNA; or
[0793] b. the CasX:gNA system of any one of 1-65, or a nucleic acid encoding the system, wherein said contacting results in modification of the target nucleic acid by the CasX protein.

[0794] Embodiment 80. The method of 79, wherein the CasX protein and the gNA are associated together in a ribonuclear protein complex (RNP).

[0795] Embodiment 81. The method of 79 or 80, further comprising a second gNA or a nucleic acid encoding the second gNA, wherein the second gNA has a targeting sequence complementary to a different or overlapping portion of the target nucleic acid.

[0796] Embodiment 82. The method of any one of 79-81, wherein the method comprises modifying the target nucleic acid of the SOD1 gene coding the SOD1 protein or the SOD1 regulatory region.

[0797] Embodiment 83. The method of any one of 79-82, further comprising contacting the target nucleic acid with a donor template comprising at least a portion of a SOD1 gene coding the SOD1 protein or the SOD1 regulatory region.

[0798] Embodiment 84. The method of any one of 79-83, wherein the modifying comprises introducing a single-stranded break in the target nucleic acid.

[0799] Embodiment 85. The method of any one of 79-85, wherein the modifying comprises introducing a double-stranded break in the target nucleic acid.

[0800] Embodiment 86. The method of 84 or 85, wherein the modifying results in an insertion, deletion, substitution, duplication, or inversion of one or more nucleotides as compared to the wild-type sequence.

[0801] Embodiment 87. The method of any one of 79-86, wherein the mutation is a gain of function mutation.

[0802] Embodiment 88. The method of any one of 79-86, wherein the mutation is a loss of function mutation.

[0803] Embodiment 89. The method of any one of 79-86, wherein the mutation of the SOD1 gene encodes an amino acid substitution selected from the group of mutations set forth in Table 1 or comprises one or more mutations that disrupt the function of the SOD1 protein.

[0804] Embodiment 90. The method of any one of 79-86, wherein the mutation of the SOD1 gene encodes an amino acid substitution selected from the group of amino acid substitutions consisting of A4S, A4T, A4V, C6F, V7E, L8Q, L8V, G12R, V14G, V14M, G16S, F20C, E21G, E21K, Q22L, G37R, L38R, L38V, G41D, G41S, H43R, F45C, H46R, H48Q, H48R, E49K, T54R, N65S, L67P, L67R, G72S, D76Y, H80A, L84F, L84V, G85R, N86S, V87A, A89T, A89V, D90A, D90V, G93A, G93C, G93D, G93R, G93V, A95G, V97M, E100G, E100K, D101G, D101N, I104F, S105L, L106V, G108V, C111Y, I112M, 1112T, I113T, G114A, R115G, V118L, D124G, D124V, D125H, L126S, S134N, N139K, L144F, L144S, A145T, C146R, G147R, V148G, V1481, 1149T, I151T of SEQ ID NO:100 and one or more amino acid substitutions that disrupt a function or expression of the SOD1 protein.

[0805] Embodiment 91. The method of 90, wherein the mutation of the SOD1 gene encodes an amino acid substitution selected from an A4V mutation of SEQ ID NO:100, a D90A mutation of SEQ ID NO:100, a G93A mutation of SEQ ID NO:100, or a combination thereof.

[0806] Embodiment 92. The method of any one of 76-91, wherein the modifying of the target nucleic acid occurs inside of a cell.

[0807] Embodiment 93. The method of 92, wherein the modifying of the target nucleic acid occurs in vivo.

[0808] Embodiment 94. The method of 92, wherein the modifying of the target nucleic acid occurs in vitro.

[0809] Embodiment 95. The method of any one of 76-94, wherein the cell is a eukaryotic cell.

[0810] Embodiment 96. The method of 95, wherein the eukaryotic cell is selected from the group consisting of a rodent cell, a mouse cell, a rat cell, a primate cell, a non-human primate cell, and a human cell.

[0811] Embodiment 97. The method of 96, wherein the eukaryotic cell is a human cell.

[0812] Embodiment 98. The method of any one of 76-97, wherein the cell is a cell of a central nervous system (CNS) or a peripheral nervous system (PNS).

[0813] Embodiment 99. The method of 98, wherein the cell is a neuron.

[0814] Embodiment 100. The method of 99, wherein the neuron is a spinal motor neuron.

[0815] Embodiment 101. The method of 98, wherein the cell is a glial cell, an oligodendrocyte, or a Schwann cell.

[0816] Embodiment 102. The method of any one of 79-101, wherein the method further comprises contacting the target nucleic acid with a donor template complementary to at least a portion of a SOD1 gene, wherein the donor template is inserted into the target nucleic acid to correct the one or more mutations or is inserted to replace the target nucleic acid.

[0817] Embodiment 103. The method of 102, wherein the donor template ranges in size from 10-10,000 nucleotides.

[0818] Embodiment 104. The method of 102, wherein the donor template ranges in size from 100-1,000 nucleotides.

[0819] Embodiment 105. The method of any one of 102-104, wherein the donor template is a single-stranded DNA template or a single stranded RNA template.

[0820] Embodiment 106. The method of any one of 102-104, wherein the donor template is a double-stranded DNA template.

[0821] Embodiment 107. The method of any one of 102-106, wherein the donor template is inserted by homology directed repair (HDR).

[0822] Embodiment 108. The method of any one of 95-107, wherein the method comprises contacting the eukaryotic cell with a vector encoding or comprising the CasX protein and the gNA, and optionally further comprising the donor template.

[0823] Embodiment 109. The method of 108, wherein the vector is an Adeno-Associated Viral (AAV) vector.

[0824] Embodiment 110. The method of 109, wherein the AAV is AAV1, AAV2, AAV3, AAV4, AAV5, AAV6, AAV7, AAV8, AAV9, AAV10, AAV-Rh74, or AAVRh10.

[0825] Embodiment 111. The method of 108, wherein the vector is a retroviral vector.

[0826] Embodiment 112. The method of any one of 95-108, wherein the method comprises contacting the eukaryotic cell with a VLP vector, wherein the VLP vector comprises the RNP of 54.

[0827] Embodiment 113. The method of any one of 108-112, wherein the vector is administered to a subject at a therapeutically effective dose.

[0828] Embodiment 114. The method of 113, wherein the subject is selected from the group consisting of mouse, rat, non-human primate, and human.

[0829] Embodiment 115. The method of 114, wherein the subject is a human.

[0830] Embodiment 116. The method of any one of 113-115, wherein the vector is administered at a dose of at least about 1×10¹⁰ vector genomes (vg), or at least about 1×10¹¹ vg, or at least about 1×10¹² vg, or at least about 1×10¹³ vg, or at least about 1×10¹⁴ vg, or at least about 1×10¹⁵ vg, or at least about 1×10¹⁶ vg.

[0831] Embodiment 117. The method of any one of 113-116, wherein the vector is administered by a route of administration selected from the group consisting of intraparenchymal, intravenous, intra-arterial, intracerebroventricular, intracisternal, intrathecal, intracranial, lumbar, and intraperitoneal routes.

[0832] Embodiment 118. The method of any one of 79-117, comprising further contacting the target nucleic acid with an additional CRISPR protein, or a polynucleotide encoding the additional CRISPR protein.

[0833] Embodiment 119. The method of 118, wherein the additional CRISPR protein is a CasX protein having a sequence different from the CasX of any of the preceding.

[0834] Embodiment 120. The method of 118, wherein the additional CRISPR protein is not a CasX protein.

[0835] Embodiment 121. A method of altering a SOD1 target nucleic acid of a cell, comprising contacting said cell with: a) CasX:gNA system of any one of 1-65; b) the nucleic acid of 66 or 67; c) the vector as in any one of 68-76; d) the VLP of 77 or 78; or e) a combination thereof.

[0836] Embodiment 122. The method of 121, wherein the cell has been modified such that expression of the SOD1 protein is reduced by at least about 50%, at least about 60%, at least about 70%, at least about 80%, at least about 90%, or at least about 95% in comparison to a cell that has not been modified.

[0837] Embodiment 123. The method of 121 or 122, wherein the cell has been modified such that the cell does not express a detectable level of the SOD1 protein.

[0838] Embodiment 124. The method of 121, wherein the cell has been modified such that it expresses SOD1 protein having the sequence of SEQ ID NO:100.

[0839] Embodiment 125. A population of cells modified by the method of 121 or 122, wherein the cells have been modified such that at least 70%, at least 75%, at least 80%, at least 85%, at least 90%, or at least 95% of the modified cells do not express a detectable level of SOD1 protein.

[0840] Embodiment 126. A population of cells modified by the method of 124, wherein the cells have been modified such that at least 70%, at least 75%, at least 80%, at least 85%, at least 90%, or at least 95% of the modified cells express a detectable level of SOD1 protein having the sequence of SEQ ID NO:100.

[0841] Embodiment 127. The population of cells of 125 or 126, wherein the cell is a non-primate mammalian cell, a non-human primate cell, or a human cell.

[0842] Embodiment 128. The population of cells of any one of 125-127, wherein the cell is selected from the group consisting of a neuron, a spinal motor neuron, a glial cell, an oligodendrocyte, or a Schwann cell.

[0843] Embodiment 129. The population of cells of any one of 125-128, wherein the cells are autologous with respect to a subject to be administered the cell.

[0844] Embodiment 130. The population of cells of any one of 125-128, wherein the cells are allogeneic with respect to a subject to be administered the cell.

[0845] Embodiment 131. A population of cells, comprising the CasX:gNA system of any one of 1-65.

[0846] Embodiment 132. A method of treating a SOD1 or related disorder in a subject in need thereof, the method comprising administering to the subject an effective amount of the cells of any one of 125-131.

[0847] Embodiment 133. The method of 132, wherein the method further comprises administering a chemotherapeutic agent.

[0848] Embodiment 134. A method of treating a SOD1 disorder in a subject in need thereof, comprising modifying a SOD1 gene having one or more mutations in a cell of the subject, the modifying comprising contacting said cell with:
[0849] a. CasX:gNA system of any one of 1-65;
[0850] b. the nucleic acid of 66 or 67;
[0851] c. the vector as in any one of 68-75;
[0852] d. the VLP of 77 or 78; or
[0853] e. a combination thereof.

[0854] Embodiment 135. The method of 134, further comprising a second gNA or a nucleic acid encoding the second gNA, wherein the second gNA has a targeting sequence complementary to a different or overlapping portion of the target nucleic acid.

[0855] Embodiment 136. The method of 134 or 135, wherein the modifying corrects the one or more mutations, or wherein expression of the SOD1 having the one or more mutations is inhibited or suppressed.

[0856] Embodiment 137. The method of any one of 134-136, wherein the method comprises contacting the cell with a vector encoding the CasX protein and the gNA, and optionally further comprising the donor template.

[0857] Embodiment 138. The method of 137, wherein the vector is an Adeno-Associated Viral (AAV) vector.

[0858] Embodiment 139. The method of 138, wherein the AAV is AAV1, AAV2, AAV3, AAV4, AAV5, AAV6, AAV7, AAV8, AAV9, AAV10, AAV-Rh74, or AAVRh10.

[0859] Embodiment 140. The method of 137, wherein the vector is a retroviral vector.

[0860] Embodiment 141. The method of any one of 134-140, wherein the vector is administered to a subject at a therapeutically effective dose.

[0861] Embodiment 142. The method of 141, wherein the subject is selected from the group consisting of mouse, rat, non-human primate, and human.

[0862] Embodiment 143. The method of 142, wherein the subject is a human.

[0863] Embodiment 144. The method of any one of 137-143, wherein the vector is administered to the subject at a dose of at least about 1×10¹⁰ vector genomes (vg), or at least about 1×10¹¹ vg, or at least about 1×10¹² vg, or at least about 1×10¹³ vg, or at least about 1×10¹⁴ vg, or at least about 1×10¹⁵ vg, or at least about 1×10¹⁶ vg.

[0864] Embodiment 145. The method of any one of 137-144, wherein the vector is administered by a route of administration selected from the group consisting of intraparenchymal, intravenous, intra-arterial, intracerebroventricular, intracisternal, intrathecal, intracranial, lumbar, and intraperitoneal routes.

[0865] Embodiment 146. The method of any one of 137-145, comprising further contacting the target nucleic acid with an additional CRISPR protein, or a polynucleotide encoding the additional CRISPR protein.

[0866] Embodiment 147. The method of 146, wherein the additional CRISPR protein is a CasX protein having a sequence different from the CasX of any of the preceding.

[0867] Embodiment 148. The method of 147, wherein the additional CRISPR protein is not a CasX protein.

[0868] Embodiment 149. The method of any one of 134-148, wherein the method results in improvement in at least one clinically-relevant endpoint selected from the group consisting of ALS Functional Rating Scale (ALSFRS-(R)), combined assessment of function and survival, duration of response, time to death, time to tracheostomy, time to persistent assisted ventilation (DTP), forced vital capacity (% FVC); manual muscle test, maximum voluntary isometric contraction, duration of response, progression-free survival, time to progression of disease, and time-to-treatment failure.

[0869] Embodiment 150. The method of any one of 134-149, wherein the method results in improvement in at least two clinically-relevant endpoints selected from the group consisting of ALS Functional Rating Scale (ALSFRS-(R)), combined assessment of function and survival, duration of response, time to death, time to tracheostomy, time to persistent assisted ventilation (DTP), forced vital capacity (% FVC); manual muscle test, maximum voluntary isometric contraction, duration of response, progression-free survival, time to progression of disease, and time-to-treatment failure.

### EXAMPLES

### Example 1: Creation, Expression and Purification of CasX Stx2

### 1. Growth and Expression

[0870] An expression construct for CasX Stx2 (also referred to herein as CasX2), derived from Planctomycetes (having the amino acid sequence of SEQ ID NO: 2 and encoded by the sequence of the Table 5, below), was constructed from gene fragments (Twist Biosciences) that were codon optimized for E. coli. The assembled construct contains a TEV-cleavable, C-terminal, TwinStrep tag and was cloned into a pBR322-derivative plasmid backbone containing an ampicillin resistance gene. The expression construct was transformed into chemically competent BL21* (DE3) E. coli and a starter culture was grown overnight in LB broth supplemented with carbenicillin at 37° C., 200 RPM, in UltraYield Flasks (Thomson Instrument Company). The following day, this culture was used to seed expression cultures at a 1:100 ratio (starter culture:expression culture). Expression cultures were Terrific Broth (Novagen) supplemented with carbenicillin and grown in UltraYield flasks at 37° C., 200 RPM. Once the cultures reached an OD of 2, they were chilled to 16° C. and IPTG (isopropyl P-D-1-thiogalactopyranoside) was added to a final concentration of 1 mM, from a 1 M stock. The cultures were induced at 16° C., 200 RPM for 20 hours before being harvested by centrifugation at 4,000×g for 15 minutes, 4° C. The cell paste was weighed and resuspended in lysis buffer (50 mM HEPES-NaOH, 250 mM NaCl, 5 mM MgCl₂, 1 mM TCEP, 1 mM benzamidine-HCL, 1 mM PMSF, 0.5% CHAPS, 10% glycerol, pH 8) at a ratio of 5 mL of lysis buffer per gram of cell paste. Once resuspended, the sample was frozen at −80° C. until purification.

TABLE 5
DNA sequence of CasX Stx2 construct

| Construct | DNA Sequence |
|---|---|
| SV40 NLS-CasX-SV40 NLS-TEV | (SEQ ID NO: 206) |
| cleavage site - TwinStrep tag | |

### 2. Purification

[0871] Frozen samples were thawed overnight at 4° C. with magnetic stirring. The viscosity of the resulting lysate was reduced by sonication and lysis was completed by homogenization in three passes at 17k PSI using an Emulsiflex C3 (Avestin). Lysate was clarified by centrifugation at 50,000×g, 4° C., for 30 minutes and the supernatant was collected. The clarified supernatant was applied to a Heparin 6 Fast Flow column (GE Life Sciences) by gravity flow. The column was washed with 5 CV of Heparin Buffer A (50 mM HEPES-NaOH, 250 mM NaCl, 5 mM MgCl₂, 1 mM TCEP, 10% glycerol, pH 8), then with 5 CV of Heparin Buffer B (Buffer A with the NaCl concentration adjusted to 500 mM). Protein was eluted with 5 CV of Heparin Buffer C (Buffer A with the NaCl concentration adjusted to 1 M), collected in fractions. Fractions were assayed for protein by Bradford Assay and protein-containing fractions were pooled. The pooled heparin eluate was applied to a Strep-Tactin XT Superflow column (IBA Life Sciences) by gravity flow. The column was washed with 5 CV of Strep Buffer (50 mM HEPES-NaOH, 500 mM NaCl, 5 mM MgCl₂, 1 mM TCEP, 10% glycerol, pH 8). Protein was eluted from the column using 5 CV of Strep Buffer with 50 mM D-Biotin added and collected in fractions. CasX-containing fractions were pooled, concentrated at 4° C. using a 30 kDa cut-off spin concentrator, and purified by size exclusion chromatography on a Superdex 200 pg column (GE Life Sciences). The column was equilibrated with SEC Buffer (25 mM sodium phosphate, 300 mM NaCl, 1 mM TCEP, 10% glycerol, pH 7.25) operated by an AKTA Pure FPLC system (GE Life Sciences). CasX-containing fractions that eluted at the appropriate molecular weight were pooled, concentrated at 4° C. using a 30 kDa cut-off spin concentrator, aliquoted, and snap-frozen in liquid nitrogen before being stored at −80° C.

### Results

[0872] Samples from throughout the purification were resolved by SDS-PAGE and visualized by colloidal Coomassie staining, as shown in FIG. 1 and FIG. 3. In FIG. 1, the lanes, from left to right, are: molecular weight standards, Pellet: insoluble portion following cell lysis, Lysate: soluble portion following cell lysis, Flow Thru: protein that did not bind the Heparin column, Wash: protein that eluted from the column in wash buffer, Elution: protein eluted from the heparin column with elution buffer, Flow Thru: Protein that did not bind the StrepTactinXT column, Elution: protein eluted from the StrepTactin XT column with elution buffer, Injection: concentrated protein injected onto the s200 gel filtration column, Frozen: pooled fractions from the s200 elution that have been concentrated and frozen. In FIG. 3, the lanes from right to left, are the injection (sample of protein injected onto the gel filtration column,) molecular weight markers, lanes 3-10 are samples from the indicated elution volumes. Results from the gel filtration are shown in FIG. 2. The 68.36 mL peak corresponds to the apparent molecular weight of CasX and contained the majority of CasX protein. The average yield was 0.75 mg of purified CasX protein per liter of culture, with 75% purity, as evaluated by colloidal Coomassie staining.

### Example 2: CasX Construct 119, 438 and 457

[0873] In order to generate the CasX 119, 438, and 457 constructs (sequences in Table 6), the codon-optimized CasX 37 construct (based on the CasX Stx2 construct of Example 1, encoding Planctomycetes CasX SEQ ID NO: 2, with a A708K substitution and a [P793] deletion with fused NLS, and linked guide and non-targeting sequences) was cloned into a mammalian expression plasmid (pStX; see FIG. 4) using standard cloning methods. To build CasX 119, the CasX 37 construct DNA was PCR amplified in two reactions using Q5 DNA polymerase (New England BioLabs Cat #M0491L) according to the manufacturer's protocol, using primers oIC539 and oIC88 as well as oIC87 and oIC540 respectively (see FIG. 5). To build CasX 457, the CasX 365 construct DNA was PCR amplified in four reactions using Q5 DNA polymerase (New England BioLabs Cat #M0491L) according to the manufacturer's protocol, using primers oIC539 and oIC212, oIC211 and oIC376, oIC375 and oIC551, and oIC550 and oIC540 respectively. To build CasX 438, the CasX 119 construct DNA was PCR amplified in four reactions using Q5 DNA polymerase (New England BioLabs Cat #M0491L) according to the manufacturer's protocol, using primers oIC539 and oIC689, oIC688 and oIC376, oIC375 and oIC551, and oIC550 and oIC540 respectively. The resulting PCR amplification products were then purified using Zymoclean™ DNA clean and concentrator (Zymo Research Cat #4014) according to the manufacturer's protocol. The pStX backbone was digested using XbaI and SpeI in order to remove the 2931 base pair fragment of DNA between the two sites in plasmid pStx34. The digested backbone fragment was purified by gel extraction from a 1% agarose gel (Gold Bio Cat #A-201-500) using Zymoclean™ Gel DNA Recovery Kit (Zymo Research Cat #D4002) according to the manufacturer's protocol. The three fragments were then pieced together using Gibson Assembly® (New England BioLabs Cat #E2621S) following the manufacturer's protocol. Assembled products in the pStx34 were transformed into chemically-competent or electro-competent Turbo Competent E. coli bacterial cells, plated on LB-Agar plates (LB: Teknova Cat #L9315, Agar: Quartzy Cat #214510) containing carbenicillin. Individual colonies were picked and miniprepped using Qiagen QIAprep® Spin Miniprep Kit (Qiagen Cat #27104) following the manufacturer's protocol. The resultant plasmids were sequenced using Sanger sequencing to ensure correct assembly. pStX34 includes an EF-1α promoter for the protein as well as a selection marker for both puromycin and carbenicillin. Sequences encoding the targeting sequences that target the gene of interest were designed based on CasX PAM locations. Targeting sequence DNA was ordered as single-stranded DNA (ssDNA) oligos (Integrated DNA Technologies) consisting of the targeting sequence and the reverse complement of this sequence. These two oligos were annealed together and cloned into pStX individually or in bulk by Golden Gate assembly using T4 DNA Ligase (New England BioLabs Cat #M0202L) and an appropriate restriction enzyme for the plasmid. Golden Gate products were transformed into chemically or electro-competent cells such as NEB Turbo competent E. coli (NEB Cat #C2984I), plated on LB-Agar plates (LB: Teknova Cat #L9315, Agar: Quartzy Cat #214510) containing carbenicillin. Individual colonies were picked and miniprepped using Qiagen QIAprep® Spin Miniprep Kit (Qiagen Cat #27104) and following the manufacturer's protocol. The resultant plasmids were sequenced using Sanger sequencing to ensure correct ligation. SaCas9 and SpyCas9 control plasmids were prepared similarly to pStX plasmids described above, with the protein and guide regions of pStX exchanged for the respective protein and guide. Targeting sequences for SaCas9 and SpyCas9 were either obtained from the literature or were rationally designed according to established methods. The expression and recovery of the CasX 119 and 457 proteins was performed using the general methodologies of Example 1 (however the DNA sequences were codon optimized for expression in E. coli). The results of analytical assays for CasX 119 are shown in FIGS. 6-8. The average yield of the CasX 119 was 1.56 mg of purified CasX protein per liter of culture at 75% purity, as evaluated by colloidal Coomassie staining. FIG. 6 shows an SDS-PAGE gel of purification samples, visualized on a Bio-Rad Stain-Free™ gel, as described. The lanes, from left to right, are: Pellet: insoluble portion following cell lysis, Lysate: soluble portion following cell lysis, Flow Thru: protein that did not bind the Heparin column, Wash: protein that eluted from the column in wash buffer, Elution: protein eluted from the heparin column with elution buffer, Flow Thru: Protein that did not bind the StrepTactinXT column, Elution: protein eluted from the StrepTactin XT column with elution buffer, Injection: concentrated protein injected onto the s200 gel filtration column, Frozen: pooled fractions from the s200 elution that have been concentrated and frozen.

[0874] FIG. 7 shows the chromatogram of Superdex 200 16/600 pg Gel Filtration, as described. Gel filtration run of CasX variant 119 protein plotted as 280 nm absorbance against elution volume. The 65.77 mL peak corresponds to the apparent molecular weight of CasX variant 119 and contained the majority of CasX variant 119 protein. FIG. 8 shows an SDS-PAGE gel of gel filtration samples, stained with colloidal Coomassie, as described. Samples from the indicated fractions were resolved by SDS-PAGE and stained with colloidal Coomassie. From right to left, Injection: sample of protein injected onto the gel filtration column, molecular weight markers, lanes 3-10: samples from the indicated elution volumes.

TABLE 6
Sequences of CasX 119, 438 and 457

| | DNA | |
|---|---|---|
| Construct | Sequence | Amino Acid Sequence |
| CasX 119 | (SEQ | QEIKRINKIRRRLVKDSNTKKAGKTGPMKTLLVRVMTPDLRERLE |
| | ID NO: | NLRKKPENIPQPISNTSRANLNKLLTDYTEMKKAILHVYWEEFQK |
| | 207) | DPVGLMSRVAQPAPKNIDQRKLIPVKDGNERLTSSGFACSQCCQP |
| | | LYVYKLEQVNDKGKPHTNYFGRCNVSEHERLILLSPHKPEANDEL |
| | | VTYSLGKFGQRALDFYSIHVTRESNHPVKPLEQIGGNSCASGPVG |
| | | KALSDACMGAVASFLTKYQDIILEHQKVIKKNEKRLANLKDIASA |
| | | NGLAFPKITLPPQPHTKEGIEAYNNVVAQIVIWVNLNLWQKLKIG |
| | | RDEAKPLQRLKGFPSFPLVERQANEVDWWDMVCNVKKLINEKKED |
| | | GKVFWQNLAGYKRQEALRPYLSSEEDRKKGKKFARYQFGDLLLHL |
| | | EKKHGEDWGKVYDEAWERIDKKVEGLSKHIKLEEERRSEDAQSKA |
| | | ALTDWLRAKASFVIEGLKEADKDEFCRCELKLQKWYGDLRGKPFA |
| | | IEAENSILDISGFSKQYNCAFIWQKDGVKKLNLYLIINYFKGGKL |
| | | RFKKIKPEAFEANRFYTVINKKSGEIVPMEVNFNFDDPNLIILPL |
| | | AFGKRQGREFIWNDLLSLETGSLKLANGRVIEKTLYNRRTRQDEP |
| | | ALFVALTFERREVLDSSNIKPMNLIGIDRGENIPAVIALTDPEGC |
| | | PLSRFKDSLGNPTHILRIGESYKEKQRTIQAKKEVEQRRAGGYSR |
| | | KYASKAKNLADDMVRNTARDLLYYAVTQDAMLIFENLSRGFGRQG |
| | | KRTFMAERQYTRMEDWLTAKLAYEGLSKTYLSKTLAQYTSKTCSN |
| | | CGFTITSADYDRVLEKLKKTATGWMTTINGKELKVEGQITYYNRY |
| | | KRQNVVKDLSVELDRLSEESVNNDISSWTKGRSGEALSLLKKRFS |
| | | HRPVQEKFVCLNCGFETHADEQAALNIARSWLFLRSQEYKKYQTN |
| | | KTTGNTDKRAFVETWQSFYRKKLKEVWKPAV (SEQ ID NO: |
| | | 208) |
| CasX 457 | (SEQ | QEIKRINKIRRRLVKDSNIKKAGKTGPMKTLLVRVMTPDLRERLE |
| | ID NO: | NLRKKPENIPQPISNTSRANLNKLLTDYTEMKKAILHVYWEEFQK |
| | 209) | DPVGLMSRVAQPAPKNIDQRKLIPVKDGNERLTSSGFACSQCCQP |
| | | LYVYKLEQVNDKGKPHTNYFGRCNVSEHERLILLSPHKPEANDEL |
| | | VTYSLGKFGQRALDFYSIHVTRESNHPVKPLEQIGGNSCASGPVG |
| | | KALSDACMGAVASFLTKYQDIILEHKKVIKKNEKRLANLKDIASA |
| | | NGLAFPKITLPPQPHTKEGIEAYNNVVAQIVIWVNLNLWQKLKIG |
| | | RDEAKPLQRLKGFPSFPLVERQANEVDWWDMVCNVKKLINEKKED |
| | | GKVFWQNLAGYKRQEALRPYLSSPEDRKKGKKFARYQLGDLLLHL |
| | | EKKHGEDWGKVYDEAWERIDKKVEGLSKHIKLEEERRSEDAQSKA |
| | | ALTDWLRAKASFVIEGLKEADKDEFCRCELKLQKWYGDLRGKPFA |
| | | IEAENSILDISGFSKQYNCAFIWQKDGVKKLNLYLIINYFKGGKL |
| | | RFKKIKPEAFEANRFYTVINKKSGEIVPMEVNFNFDDPNLIILPL |
| | | AFGKRQGREFIWNDLLSLETGSLKLANGRVIEKPLYNRRTRQDEP |
| | | ALFVALTFERREVLDSSNIKPMNLIGVDRGENIPAVIALTDPEGC |
| | | PLSRFKDSLGNPTHILRIGESYKEKQRTIQAKKEVEQRRAGGYSR |
| | | KYASKAKNLADDMVRNTARDLLYYAVTQDAMLIFENLSRGFGRQG |
| | | KRTFMAERQYTRMEDWLTAKLAYEGLSKTYLSKTLAQYTSKTCSN |
| | | CGFTITSADYDRVLEKLKKTATGWMTTINGKELKVEGQITYYNRR |
| | | KRQNVVKDLSVELDRLSEESVNNDISSWTKGRSGEALSLLKKRFS |
| | | HRPVQEKFVCLNCGFETHADEQAALNIARSWLFLRSQEYKKYQTN |
| | | KTTGNTDKRAFVETWQSFYRKKLKEVWKPAV (SEQ ID NO: |
| | | 210) |
| CasX 438 | SEQ | QEIKRINKIRRRLVKDSNIKKAGKTGPMKTLLVRVMTPDLRERLE |
| | ID NO: | NLRKKPENIPQPISNTSRANLNKLLTDYTEMKKAILHVYWEEFQK |
| | 211) | DPVGLMSRVAQPAPKNIDQRKLIPVKDGNERLTSSGFACSQCCQP |
| | | LYVYKLEQVNDKGKPHTNYFGRCNVSEHERLILLSPHKPEANDEL |
| | | VTYSLGKFGQRALDFYSIHVTRESNHPVKPLEQIGGNSCASGPVG |
| | | KALSDACMGAVASFLTKYQDIILEHQKVIKKNEKRLANLKDIASA |
| | | NGLAFPKITLPPQPHTKEGIEAYNNVVAQIVIWVNLNLWQKLKIG |
| | | RDEAKPLQRLKGFPSFPLVERQANEVDWWDMVCNVKKLINEKKED |
| | | GKVFWQNLAGYKRQEALRPYLSSEEDRKKGKKFARYQLGDLLKHL |
| | | EKKHGEDWGKVYDEAWERIDKKVEGLSKHIKLEEERRSEDAQSKA |
| | | ALTDWLRAKASFVIEGLKEADKDEFCRCELKLQKWYGDLRGKPFA |
| | | IEAENSILDISGFSKQYNCAFIWQKDGVKKLNLYLIINYFKGGKL |
| | | RFKKIKPEAFEANRFYTVINKKSGEIVPMEVNFNFDDPNLIILPL |
| | | AFGKRQGREFIWNDLLSLETGSLKLANGRVIEKTLYNRRTRQDEP |
| | | ALFVALTFERREVLDSSNIKPMNLIGVDRGENIPAVIALTDPEGC |
| | | PLSRFKDSLGNPTHILRIGESYKEKQRTIQAKKEVEQRRAGGYSR |
| | | KYASKAKNLADDMVRNTARDLLYYAVTQDAMLIFENLSRGFGRQG |
| | | KRTFMAERQYTRMEDWLTAKLAYEGLSKTYLSKTLAQYTSKTCSN |
| | | CGFTITSADYDRVLEKLKKTATGWMTTINGKELKVEGQITYYNRR |
| | | KRQNVVKDLSVELDRLSEESVNNDISSWTKGRSGEALSLLKKRFS |
| | | HRPVQEKFVCLNCGFETHADEQAALNIARSWLFLRSQEYKKYQTN |
| | | KTTGNTDKRAFVETWQSFYRKKLKEVWKPAV (SEQ ID NO: |
| | | 212) |

### Example 3: CasX Construct 488 and 491

[0875] In order to generate the CasX 488 construct (sequences in Table 7), the codon-optimized CasX 119 construct (based on the CasX Stx2 construct of Example 1, encoding Planctomycetes CasX SEQ ID NO: 2, with a A708K substitution, a L379R substitution, and a [P793] deletion with fused NLS, and linked guide and non-targeting sequences) was cloned into a mammalian expression plasmid (pStX; see FIG. 4) using standard cloning methods. Construct CasX 1 (based on the CasX Stx1 construct of Example 1, encoding CasX SEQ ID NO: 1) was cloned into a destination vector using standard cloning methods. To build CasX 488, the CasX 119 construct DNA was PCR amplified using Q5 DNA polymerase (New England BioLabs Cat #M0491L) according to the manufacturer's protocol, using primers oIC765 and oIC762 (see FIG. 5). The CasX 1 construct was PCR amplified using Q5 DNA polymerase (New England BioLabs Cat #M0491L) according to the manufacturer's protocol, using primers oIC766 and oIC784. The PCR products were purified by gel extraction from a 1% agarose gel (Gold Bio Cat #A-201-500) using Zymoclean™ Gel DNA Recovery Kit (Zymo Research Cat #D4002) according to the manufacturer's protocol. The two fragments were then pieced together using Gibson Assembly® (New England BioLabs Cat #E2621S) following the manufacturer's protocol. Assembled products in pStx1 were transformed into chemically-competent Turbo Competent E. coli bacterial cells, plated on LB-Agar plates (LB: Teknova Cat #L9315, Agar: Quartzy Cat #214510) containing kanamycin. Individual colonies were picked and miniprepped using Qiagen QIAprep® Spin Miniprep Kit (Qiagen Cat #27104) following the manufacturer's protocol. The resultant plasmids were sequenced using Sanger sequencing to ensure correct assembly. The correct clones were then subcloned into the mammalian expression vector pStx34 using restriction enzyme cloning. The pStx34 backbone and the CasX 488 clone in pStx1 were digested with XbaI and BamHI respectively. The digested backbone and insert fragments were purified by gel extraction from a 1% agarose gel (Gold Bio Cat #A-201-500) using Zymoclean™ Gel DNA Recovery Kit (Zymo Research Cat #D4002) according to the manufacturer's protocol. The clean backbone and insert were then ligated together using T4 Ligase (New England Biolabs Cat #M0202L) according to the manufacturer's protocol. The ligated product was transformed into chemically-competent Turbo Competent E. coli bacterial cells, plated on LB-Agar plates (LB: Teknova Cat #L9315, Agar: Quartzy Cat #214510) containing carbenicillin. Individual colonies were picked and miniprepped using Qiagen QIAprep® Spin Miniprep Kit (Qiagen Cat #27104) following the manufacturer's protocol. The resultant plasmids were sequenced using Sanger sequencing to ensure correct assembly.

[0876] In order to generate CasX 491 (sequences in Table 7), the CasX 484 construct DNA was PCR amplified using Q5 DNA polymerase (New England BioLabs Cat #M0491L) according to the manufacturer's protocol, using primers oIC765 and oIC762 (see FIG. 5). The CasX 1 construct was PCR amplified using Q5 DNA polymerase (New England BioLabs Cat #M0491L) according to the manufacturer's protocol, using primers oIC766 and oIC784. The PCR products were purified by gel extraction from a 1% agarose gel (Gold Bio Cat #A-201-500) using Zymoclean™ Gel DNA Recovery Kit (Zymo Research Cat #D4002) according to the manufacturer's protocol. The two fragments were then pieced together using Gibson Assembly® (New England BioLabs Cat #E2621S) following the manufacturer's protocol. Assembled products in pStx1 were transformed into chemically-competent Turbo Competent E. coli bacterial cells, plated on LB-Agar plates (LB: Teknova Cat #L9315, Agar: Quartzy Cat #214510) containing kanamycin. Individual colonies were picked and miniprepped using Qiagen QIAprep® Spin Miniprep Kit (Qiagen Cat #27104) following the manufacturer's protocol. The resultant plasmids were sequenced using Sanger sequencing to ensure correct assembly. The correct clones were then subcloned into the mammalian expression vector pStx34 using restriction enzyme cloning. The pStx34 backbone and the CasX 491 clone in pStx1 were digested with XbaI and BamHI respectively. The digested backbone and insert fragments were purified by gel extraction from a 1% agarose gel (Gold Bio Cat #A-201-500) using Zymoclean™ Gel DNA Recovery Kit (Zymo Research Cat #D4002) according to the manufacturer's protocol. The clean backbone and insert were then ligated together using T4 Ligase (New England Biolabs Cat #M0202L) according to the manufacturer's protocol. The ligated product was transformed into chemically-competent Turbo Competent E. coli bacterial cells, plated on LB-Agar plates (LB: Teknova Cat #L9315, Agar: Quartzy Cat #214510) containing carbenicillin. Individual colonies were picked and miniprepped using Qiagen QIAprep® Spin Miniprep Kit (Qiagen Cat #27104) following the manufacturer's protocol. The resultant plasmids were sequenced using Sanger sequencing to ensure correct assembly. pStX34 includes an EF-1α promoter for the protein as well as a selection marker for both puromycin and carbenicillin. Sequences encoding the targeting sequences that target the gene of interest were designed based on CasX PAM locations. Targeting sequence DNA was ordered as single-stranded DNA (ssDNA) oligos (Integrated DNA Technologies) consisting of the targeting sequence and the reverse complement of this sequence. These two oligos were annealed together and cloned into pStX individually or in bulk by Golden Gate assembly using T4 DNA Ligase (New England BioLabs Cat #M0202L) and an appropriate restriction enzyme for the plasmid. Golden Gate products were transformed into chemically or electro-competent cells such as NEB Turbo competent E. coli (NEB Cat #C2984I), plated on LB-Agar plates (LB: Teknova Cat #L9315, Agar: Quartzy Cat #214510) containing carbenicillin. Individual colonies were picked and miniprepped using Qiagen QIAprep® Spin Miniprep Kit (Qiagen Cat #27104) and following the manufacturer's protocol. The resultant plasmids were sequenced using Sanger sequencing to ensure correct ligation. SaCas9 and SpyCas9 control plasmids were prepared similarly to pStX plasmids described above, with the protein and guide regions of pStX exchanged for the respective protein and guide. Targeting sequences for SaCas9 and SpyCas9 were either obtained from the literature or were rationally designed according to established methods. The expression and recovery of the CasX constructs was performed using the general methodologies of Example 1 and Example 2, with similar results obtained.

TABLE 7
Sequences of CasX 488 and 491

| Construct | DNA Sequence | Amino Acid Sequence |
|---|---|---|
| CasX 488 | (SEQ ID NO: 213) | QEIKRINKIRRRLVKDSNTKKAGKTGPMKTLLVRVMTPDLRERLE |
| | | NLRKKPENIPQPISNTSRANLNKLLTDYTEMKKAILHVYWEEFQK |
| | | DPVGLMSRVAQPASKKIDQNKLKPEMDEKGNLTTAGFACSQCGQP |
| | | LFVYKLEQVSEKGKAYTNYFGRCNVAEHEKLILLAQLKPEKDSDE |
| | | AVTYSLGKFGQRALDFYSIHVTKESTHPVKPLAQIAGNRYASGPV |
| | | GKALSDACMGTIASFLSKYQDIIIEHQKVVKGNQKRLESLRELAG |
| | | KENLEYPSVTLPPQPHTKEGVDAYNEVIARVRMWVNLNLWQKLKL |
| | | SRDDAKPLLRLKGFPSFPLVERQANEVDWWDMVCNVKKLINEKKE |
| | | DGKVFWQNLAGYKRQEALRPYLSSEEDRKKGKKFARYQFGDLLLH |
| | | LEKKHGEDWGKVYDEAWERIDKKVEGLSKHIKLEEERRSEDAQSK |
| | | AALTDWLRAKASFVIEGLKEADKDEFCRCELKLQKWYGDLRGKPF |
| | | AIEAENSILDISGFSKQYNCAFIWQKDGVKKLNLYLIINYFKGGK |
| | | LRFKKIKPEAFEANRFYTVINKKSGEIVPMEVNFNFDDPNLIILP |
| | | LAFGKRQGREFIWNDLLSLETGSLKLANGRVIEKTLYNRRTRQDE |
| | | PALFVALTFERREVLDSSNIKPMNLIGIDRGENIPAVIALTDPEG |
| | | CPLSRFKDSLGNPTHILRIGESYKEKQRTIQAKKEVEQRRAGGYS |
| | | RKYASKAKNLADDMVRNTARDLLYYAVTQDAMLIFENLSRGFGRQ |
| | | GKRTFMAERQYTRMEDWLTAKLAYEGLSKTYLSKTLAQYTSKTCS |
| | | NCGFTITSADYDRVLEKLKKTATGWMTTINGKELKVEGQITYYNR |
| | | YKRQNVVKDLSVELDRLSEESVNNDISSWTKGRSGEALSLLKKRF |
| | | SHRPVQEKFVCLNCGFETHADEQAALNIARSWLFLRSQEYKKYQT |
| | | NKTTGNTDKRAFVETWQSFYRKKLKEVWKPAV |
| | | (SEQ ID NO: 214) |
| CasX 491 | (SEQ ID NO: 215) | QEIKRINKIRRRLVKDSNTKKAGKTGPMKTLLVRVMTPDLRERLE |
| | | NLRKKPENIPQPISNTSRANLNKLLTDYTEMKKAILHVYWEEFQK |
| | | DPVGLMSRVAQPASKKIDQNKLKPEMDEKGNLTTAGFACSQCGQP |
| | | LFVYKLEQVSEKGKAYTNYFGRCNVAEHEKLILLAQLKPEKDSDE |
| | | AVTYSLGKFGQRALDFYSIHVTKESTHPVKPLAQIAGNRYASGPV |
| | | GKALSDACMGTIASFLSKYQDIIIEHQKVVKGNQKRLESLRELAG |
| | | KENLEYPSVTLPPQPHTKEGVDAYNEVIARVRMWVNLNLWQKLKL |
| | | SRDDAKPLLRLKGFPSFPLVERQANEVDWWDMVCNVKKLINEKKE |
| | | DGKVFWQNLAGYKRQEALRPYLSSEEDRKKGKKFARYQLGDLLLH |
| | | LEKKHGEDWGKVYDEAWERIDKKVEGLSKHIKLEEERRSEDAQSK |
| | | AALTDWLRAKASFVIEGLKEADKDEFCRCELKLQKWYGDLRGKPF |
| | | AIEAENSILDISGFSKQYNCAFIWQKDGVKKLNLYLIINYFKGGK |
| | | LRFKKIKPEAFEANRFYTVINKKSGEIVPMEVNFNFDDPNLIILP |
| | | LAFGKRQGREFIWNDLLSLETGSLKLANGRVIEKTLYNRRTRQDE |
| | | PALFVALTFERREVLDSSNIKPMNLIGVDRGENIPAVIALTDPEG |
| | | CPLSRFKDSLGNPTHILRIGESYKEKQRTIQAKKEVEQRRAGGYS |
| | | RKYASKAKNLADDMVRNTARDLLYYAVTQDAMLIFENLSRGFGRQ |
| | | GKRTFMAERQYTRMEDWLTAKLAYEGLSKTYLSKTLAQYTSKTCS |
| | | NCGFTITSADYDRVLEKLKKTATGWMTTINGKELKVEGQITYYNR |
| | | YKRQNVVKDLSVELDRLSEESVNNDISSWTKGRSGEALSLLKKRF |
| | | SHRPVQEKFVCLNCGFETHADEQAALNIARSWLFLRSQEYKKYQT |
| | | NKTTGNTDKRAFVETWQSFYRKKLKEVWKPAV |
| | | (SEQ ID NO: 216) |

### Example 4: Design and Generation of CasX Constructs 278-280, 285-288, 290, 291, 293, 300, 492, and 493

[0877] In order to generate the CasX 278-280, 285-288, 290, 291, 293, 300, 492, and 493 constructs (sequences in Table 8), the N- and C-termini of the codon-optimized CasX 119 construct (based on the CasX Stx37 construct of Example 2, encoding Planctomycetes CasX SEQ ID NO: 2, with a A708K substitution and a [P793] deletion with fused NLS, and linked guide and non-targeting sequences) in a mammalian expression vector were manipulated to delete or add NLS sequences (sequences in Table 9). Constructs 278, 279, and 280 were manipulations of the N- and C-termini using only an SV40 NLS sequence. Construct 280 had no NLS on the N-terminus and added two SV40 NLS' on the C-terminus with a triple proline linker in between the two SV40 NLS sequences. Constructs 278, 279, and 280 were made by amplifying pStx34.119.174.NT with Q5 DNA polymerase (New England BioLabs Cat #M0491L) according to the manufacturer's protocol, using primers oIC527 and oIC528, oIC730 and oIC522, and oIC730 and oIC530 for the first fragments each and using oIC529 and oIC520, oIC519 and oIC731, and oIC529 and oIC731 to create the second fragments each. These fragments were purified by gel extraction from a 1% agarose gel (Gold Bio Cat #A-201-500) using Zymoclean™ Gel DNA Recovery Kit (Zymo Research Cat #D4002) according to the manufacturer's protocol. The respective fragments were cloned together using Gibson Assembly® (New England BioLabs Cat #E2621S) following the manufacturer's protocol. Assembled products in the pStx34 were transformed into chemically-competent Turbo Competent E. coli bacterial cells, plated on LB-Agar plates (LB: Teknova Cat #L9315, Agar: Quartzy Cat #214510) containing carbenicillin and incubated at 37° C. Individual colonies were picked and miniprepped using Qiagen QIAprep® Spin Miniprep Kit (Qiagen Cat #27104) following the manufacturer's protocol. The resultant plasmids were sequenced using Sanger sequencing to ensure correct assembly. Sequences encoding the targeting sequences that target the gene of interest were designed based on CasX PAM locations. Targeting sequence DNA was ordered as single-stranded DNA (ssDNA) oligos (Integrated DNA Technologies) consisting of the targeting sequence and the reverse complement of this sequence. These two oligos were annealed together and cloned into pStX individually or in bulk by Golden Gate assembly using T4 DNA Ligase (New England BioLabs Cat #M0202L) and an appropriate restriction enzyme for the plasmid. Golden Gate products were transformed into chemically- or electro-competent cells such as NEB Turbo competent E. coli (NEB Cat #C2984I), plated on LB-Agar plates (LB: Teknova Cat #L9315, Agar: Quartzy Cat #214510) containing carbenicillin and incubated at 37° C. Individual colonies were picked and miniprepped using Qiagen QIAprep® Spin Miniprep Kit (Qiagen Cat #27104) and following the manufacturer's protocol. The resultant plasmids were sequenced using Sanger sequencing to ensure correct ligation.

[0878] In order to generate constructs 285-288, 290, 291, 293, and 300, a nested PCR method was used for cloning. The backbone vector and PCR template used was construct pStx34 279.119.174.NT, having the CasX 119, guide 174, and non-targeting spacer (see Examples 8 and 9 and Tables therein for sequences). Construct 278 has the configuration SV40NLS-CasX119. Construct 279 has the configuration CasX119-SV40NLS. Construct 280 has the configuration CasX119-SV40NLS-PPP linker-SV40NLS. Construct 285 has the configuration CasX119-SV40NLS-PPP linker-SynthNLS3. Construct 286 has the configuration CasX119-SV40NLS-PPP linker-SynthNLS4. Construct 287 has the configuration CasX119-SV40NLS-PPP linker-SynthNLS5. Construct 288 has the configuration CasX119-SV40NLS-PPP linker-SynthNLS6. Constrict 290 has the configuration CasX119-SV40NLS-PPP linker-EGL-13 NLS. Construct 291 has the configuration CasX119-SV40NLS-PPP linker-c-Myc NLS. Construct 293 has the configuration CasX119-SV40NLS-PPP linker-Nucleolar RNA Helicase II NLS. Construct 300 has the configuration CasX119-SV40NLS-PPP linker-Influenza A protein NLS. Construct 492 has the configuration SV40NLS-CasX119-SV40NLS-PPP linker-SV40NLS. Construct 493 has the configuration SV40NLS-CasX119-SV40NLS-PPP linker-c-Myc NLS. Each variant had a set of three PCRs; two of which were nested, were purified by gel extraction, digested, and then ligated into the digested and purified backbone. Assembled products in the pStx34 were transformed into chemically-competent Turbo Competent E. coli bacterial cells, plated on LB-Agar plates (LB: Teknova Cat #L9315, Agar: Quartzy Cat #214510) containing carbenicillin and incubated at 37° C. Individual colonies were picked and miniprepped using Qiagen QIAprep® Spin Miniprep Kit (Qiagen Cat #27104) following the manufacturer's protocol. The resultant plasmids were sequenced using Sanger sequencing to ensure correct assembly. Sequences encoding the targeting sequences that target the gene of interest were designed based on CasX PAM locations. Targeting sequence DNA was ordered as single-stranded DNA (ssDNA) oligos (Integrated DNA Technologies) consisting of the targeting sequence and the reverse complement of this sequence. These two oligos were annealed together and cloned into the resulting pStX individually or in bulk by Golden Gate assembly using T4 DNA Ligase (New England BioLabs Cat #M0202L) and an appropriate restriction enzyme for the plasmid. Golden Gate products were transformed into chemically- or electro-competent cells such as NEB Turbo competent E. coli (NEB Cat #C2984I), plated on LB-Agar plates (LB: Teknova Cat #L9315, Agar: Quartzy Cat #214510) containing carbenicillin and incubated at 37° C. Individual colonies were picked and miniprepped using Qiagen QIAprep® Spin Miniprep Kit (Qiagen Cat #27104) and following the manufacturer's protocol. The resultant plasmids were sequenced using Sanger sequencing to ensure correct ligation.

[0879] In order to generate constructs 492 and 493, constructs 280 and 291 were digested using XbaI and BamHI (NEB #R0145S and NEB #R3136S) according to the manufacturer's protocol. Next, they were purified by gel extraction from a 1% agarose gel (Gold Bio Cat #A-201-500) using Zymoclean™ Gel DNA Recovery Kit (Zymo Research Cat #D4002) according to the manufacturer's protocol. Finally, they were ligated using T4 DNA ligase (NEB #M0202S) according to the manufacturer's protocol into the digested and purified pStx34.119.174.NT using XbaI and BamHI and Zymoclean™ Gel DNA Recovery Kit. Assembled products in the pStx34 were transformed into chemically-competent Turbo Competent E. coli bacterial cells, plated on LB-Agar plates (LB: Teknova Cat #L9315, Agar: Quartzy Cat #214510) containing carbenicillin and incubated at 37° C. Individual colonies were picked and miniprepped using Qiagen QIAprep® Spin Miniprep Kit (Qiagen Cat #27104) following the manufacturer's protocol. The resultant plasmids were sequenced using Sanger sequencing to ensure correct assembly. Sequences encoding the targeting spacer sequences that target the gene of interest were designed based on CasX PAM locations. Targeting sequence DNA was ordered as single-stranded DNA (ssDNA) oligos (Integrated DNA Technologies) consisting of the targeting spacer sequence and the reverse complement of this sequence. These two oligos were annealed together and cloned into each pStX individually or in bulk by Golden Gate assembly using T4 DNA Ligase (New England BioLabs Cat #M0202L) and an appropriate restriction enzyme for the respective plasmids. Golden Gate products were transformed into chemically- or electro-competent cells such as NEB Turbo competent E. coli (NEB Cat #C2984I), plated on LB-Agar plates (LB: Teknova Cat #L9315, Agar: Quartzy Cat #214510) containing carbenicillin and incubated at 37° C. Individual colonies were picked and miniprepped using Qiagen QIAprep® Spin Miniprep Kit (Qiagen Cat #27104) and following the manufacturer's protocol. The resultant plasmids were sequenced using Sanger sequencing to ensure correct ligation. The plasmids would be used to produce and recover CasX protein utilizing the general methodologies of Examples 1 and 2.

TABLE 8
CasX 278-280, 285-288, 290, 291, 293, 300, 492, and 493 sequences

| Construct | Amino Acid Sequence |
|---|---|
| 278 | MAPKKKRKVSRQEIKRINKIRRRLVKDSNTKKAGKTGPMKTLLVRVMTPDLRERL |
| | ENLRKKPENIPQPISNTSRANLNKLLTDYTEMKKAILHVYWEEFQKDPVGLMSRV |
| | AQPAPKNIDQRKLIPVKDGNERLTSSGFACSQCCQPLYVYKLEQVNDKGKPHTNY |
| | FGRCNVSEHERLILLSPHKPEANDELVTYSLGKFGQRALDFYSIHVTRESNHPVK |
| | PLEQIGGNSCASGPVGKALSDACMGAVASFLTKYQDIILEHQKVIKKNEKRLANL |
| | KDIASANGLAFPKITLPPQPHTKEGIEAYNNVVAQIVIWVNLNLWQKLKIGRDEA |
| | KPLQRLKGFPSFPLVERQANEVDWWDMVCNVKKLINEKKEDGKVFWQNLAGYKRQ |
| | EALRPYLSSEEDRKKGKKFARYQFGDLLLHLEKKHGEDWGKVYDEAWERIDKKVE |
| | GLSKHIKLEEERRSEDAQSKAALTDWLRAKASFVIEGLKEADKDEFCRCELKLQK |
| | WYGDLRGKPFAIEAENSILDISGFSKQYNCAFIWQKDGVKKLNLYLIINYFKGGK |
| | LRFKKIKPEAFEANRFYTVINKKSGEIVPMEVNFNFDDPNLIILPLAFGKRQGRE |
| | FIWNDLLSLETGSLKLANGRVIEKTLYNRRTRQDEPALFVALTFERREVLDSSNI |
| | KPMNLIGIDRGENIPAVIALTDPEGCPLSRFKDSLGNPTHILRIGESYKEKQRTI |
| | QAKKEVEQRRAGGYSRKYASKAKNLADDMVRNTARDLLYYAVTQDAMLIFENLSR |
| | GFGRQGKRTFMAERQYTRMEDWLTAKLAYEGLSKTYLSKTLAQYTSKTCSNCGFT |
| | ITSADYDRVLEKLKKTATGWMTTINGKELKVEGQITYYNRYKRQNVVKDLSVELD |
| | RLSEESVNNDISSWTKGRSGEALSLLKKRFSHRPVQEKFVCLNCGFETHADEQAA |
| | LNIARSWLFLRSQEYKKYQTNKTTGNTDKRAFVETWQSFYRKKLKEVWKPAV |
| | (SEQ ID NO: 217) |
| 279 | MQEIKRINKIRRRLVKDSNTKKAGKTGPMKTLLVRVMTPDLRERLENLRKKPENI |
| | PQPISNTSRANLNKLLTDYTEMKKAILHVYWEEFQKDPVGLMSRVAQPAPKNIDQ |
| | RKLIPVKDGNERLTSSGFACSQCCQPLYVYKLEQVNDKGKPHTNYFGRCNVSEHE |
| | RLILLSPHKPEANDELVTYSLGKFGQRALDFYSIHVTRESNHPVKPLEQIGGNSC |
| | ASGPVGKALSDACMGAVASFLTKYQDIILEHQKVIKKNEKRLANLKDIASANGLA |
| | FPKITLPPQPHTKEGIEAYNNVVAQIVIWVNLNLWQKLKIGRDEAKPLQRLKGFP |
| | SFPLVERQANEVDWWDMVCNVKKLINEKKEDGKVFWQNLAGYKRQEALRPYLSSE |
| | EDRKKGKKFARYQFGDLLLHLEKKHGEDWGKVYDEAWERIDKKVEGLSKHIKLEE |
| | ERRSEDAQSKAALTDWLRAKASFVIEGLKEADKDEFCRCELKLQKWYGDLRGKPF |
| | AIEAENSILDISGFSKQYNCAFIWQKDGVKKLNLYLIINYFKGGKLRFKKIKPEA |
| | FEANRFYTVINKKSGEIVPMEVNFNFDDPNLIILPLAFGKRQGREFIWNDLLSLE |
| | TGSLKLANGRVIEKTLYNRRTRQDEPALFVALTFERREVLDSSNIKPMNLIGIDR |
| | GENIPAVIALTDPEGCPLSRFKDSLGNPTHILRIGESYKEKQRTIQAKKEVEQRR |
| | AGGYSRKYASKAKNLADDMVRNTARDLLYYAVTQDAMLIFENLSRGFGRQGKRTF |
| | MAERQYTRMEDWLTAKLAYEGLSKTYLSKTLAQYTSKTCSNCGFTITSADYDRVL |
| | EKLKKTATGWMTTINGKELKVEGQITYYNRYKRQNVVKDLSVELDRLSEESVNND |
| | ISSWTKGRSGEALSLLKKRFSHRPVQEKFVCLNCGFETHADEQAALNIARSWLFL |
| | RSQEYKKYQTNKTTGNTDKRAFVETWQSFYRKKLKEVWKPAVTSPKKKRKV |
| | (SEQ ID NO: 218) |
| 280 | MQEIKRINKIRRRLVKDSNTKKAGKTGPMKTLLVRVMTPDLRERLENLRKKPENI |
| | PQPISNTSRANLNKLLTDYTEMKKAILHVYWEEFQKDPVGLMSRVAQPAPKNIDQ |
| | RKLIPVKDGNERLTSSGFACSQCCQPLYVYKLEQVNDKGKPHTNYFGRCNVSEHE |
| | RLILLSPHKPEANDELVTYSLGKFGQRALDFYSIHVTRESNHPVKPLEQIGGNSC |
| | ASGPVGKALSDACMGAVASFLTKYQDIILEHQKVIKKNEKRLANLKDIASANGLA |
| | FPKITLPPQPHTKEGIEAYNNVVAQIVIWVNLNLWQKLKIGRDEAKPLQRLKGFP |
| | SFPLVERQANEVDWWDMVCNVKKLINEKKEDGKVFWQNLAGYKRQEALRPYLSSE |
| | EDRKKGKKFARYQFGDLLLHLEKKHGEDWGKVYDEAWERIDKKVEGLSKHIKLEE |
| | ERRSEDAQSKAALTDWLRAKASFVIEGLKEADKDEFCRCELKLQKWYGDLRGKPF |
| | AIEAENSILDISGFSKQYNCAFIWQKDGVKKLNLYLIINYFKGGKLRFKKIKPEA |
| | FEANRFYTVINKKSGEIVPMEVNFNFDDPNLIILPLAFGKRQGREFIWNDLLSLE |
| | TGSLKLANGRVIEKTLYNRRTRQDEPALFVALTFERREVLDSSNIKPMNLIGIDR |
| | GENIPAVIALTDPEGCPLSRFKDSLGNPTHILRIGESYKEKQRTIQAKKEVEQRR |
| | AGGYSRKYASKAKNLADDMVRNTARDLLYYAVTQDAMLIFENLSRGFGRQGKRTF |
| | MAERQYTRMEDWLTAKLAYEGLSKTYLSKTLAQYTSKTCSNCGFTITSADYDRVL |
| | EKLKKTATGWMTTINGKELKVEGQITYYNRYKRQNVVKDLSVELDRLSEESVNND |
| | ISSWTKGRSGEALSLLKKRFSHRPVQEKFVCLNCGFETHADEQAALNIARSWLFL |
| | RSQEYKKYQTNKTTGNTDKRAFVETWQSFYRKKLKEVWKPAVTSPKKKRKVPPPP |
| | KKKRKV (SEQ ID NO: 219) |
| 285 | MQEIKRINKIRRRLVKDSNTKKAGKTGPMKTLLVRVMTPDLRERLENLRKKPENI |
| | PQPISNTSRANLNKLLTDYTEMKKAILHVYWEEFQKDPVGLMSRVAQPAPKNIDQ |
| | RKLIPVKDGNERLTSSGFACSQCCQPLYVYKLEQVNDKGKPHTNYFGRCNVSEHE |
| | RLILLSPHKPEANDELVTYSLGKFGQRALDFYSIHVTRESNHPVKPLEQIGGNSC |
| | ASGPVGKALSDACMGAVASFLTKYQDIILEHQKVIKKNEKRLANLKDIASANGLA |
| | FPKITLPPQPHTKEGIEAYNNVVAQIVIWVNLNLWQKLKIGRDEAKPLQRLKGFP |
| | SFPLVERQANEVDWWDMVCNVKKLINEKKEDGKVFWQNLAGYKRQEALRPYLSSE |
| | EDRKKGKKFARYQFGDLLLHLEKKHGEDWGKVYDEAWERIDKKVEGLSKHIKLEE |
| | ERRSEDAQSKAALTDWLRAKASFVIEGLKEADKDEFCRCELKLQKWYGDLRGKPF |
| | AIEAENSILDISGFSKQYNCAFIWQKDGVKKLNLYLIINYFKGGKLRFKKIKPEA |
| | FEANRFYTVINKKSGEIVPMEVNFNFDDPNLIILPLAFGKRQGREFIWNDLLSLE |
| | TGSLKLANGRVIEKTLYNRRTRQDEPALFVALTFERREVLDSSNIKPMNLIGIDR |
| | GENIPAVIALTDPEGCPLSRFKDSLGNPTHILRIGESYKEKQRTIQAKKEVEQRR |
| | AGGYSRKYASKAKNLADDMVRNTARDLLYYAVTQDAMLIFENLSRGFGRQGKRTF |
| | MAERQYTRMEDWLTAKLAYEGLSKTYLSKTLAQYTSKTCSNCGFTITSADYDRVL |
| | EKLKKTATGWMTTINGKELKVEGQITYYNRYKRQNVVKDLSVELDRLSEESVNND |
| | ISSWTKGRSGEALSLLKKRFSHRPVQEKFVCLNCGFETHADEQAALNIARSWLFL |
| | RSQEYKKYQTNKTTGNTDKRAFVETWQSFYRKKLKEVWKPAVTSPKKKRKVPPPH |
| | KKKHPDASVNFSEFSK (SEQ ID NO: 220) |
| 286 | MQEIKRINKIRRRLVKDSNTKKAGKTGPMKTLLVRVMTPDLRERLENLRKKPENI |
| | PQPISNTSRANLNKLLTDYTEMKKAILHVYWEEFQKDPVGLMSRVAQPAPKNIDQ |
| | RKLIPVKDGNERLTSSGFACSQCCQPLYVYKLEQVNDKGKPHTNYFGRCNVSEHE |
| | RLILLSPHKPEANDELVTYSLGKFGQRALDFYSIHVTRESNHPVKPLEQIGGNSC |
| | ASGPVGKALSDACMGAVASFLTKYQDIILEHQKVIKKNEKRLANLKDIASANGLA |
| | FPKITLPPQPHTKEGIEAYNNVVAQIVIWVNLNLWQKLKIGRDEAKPLQRLKGFP |
| | SFPLVERQANEVDWWDMVCNVKKLINEKKEDGKVFWQNLAGYKRQEALRPYLSSE |
| | EDRKKGKKFARYQFGDLLLHLEKKHGEDWGKVYDEAWERIDKKVEGLSKHIKLEE |
| | ERRSEDAQSKAALTDWLRAKASFVIEGLKEADKDEFCRCELKLQKWYGDLRGKPF |
| | AIEAENSILDISGFSKQYNCAFIWQKDGVKKLNLYLIINYFKGGKLRFKKIKPEA |
| | FEANRFYTVINKKSGEIVPMEVNFNFDDPNLIILPLAFGKRQGREFIWNDLLSLE |
| | TGSLKLANGRVIEKTLYNRRTRQDEPALFVALTFERREVLDSSNIKPMNLIGIDR |
| | GENIPAVIALTDPEGCPLSRFKDSLGNPTHILRIGESYKEKQRTIQAKKEVEQRR |
| | AGGYSRKYASKAKNLADDMVRNTARDLLYYAVTQDAMLIFENLSRGFGRQGKRTF |
| | MAERQYTRMEDWLTAKLAYEGLSKTYLSKTLAQYTSKTCSNCGFTITSADYDRVL |
| | EKLKKTATGWMTTINGKELKVEGQITYYNRYKRQNVVKDLSVELDRLSEESVNND |
| | ISSWTKGRSGEALSLLKKRFSHRPVQEKFVCLNCGFETHADEQAALNIARSWLFL |
| | RSQEYKKYQTNKTTGNTDKRAFVETWQSFYRKKLKEVWKPAVTSPKKKRKVPPPQ |
| | RPGPYDRPQRPGPYDRP (SEQ ID NO: 221) |
| 287 | MQEIKRINKIRRRLVKDSNTKKAGKTGPMKTLLVRVMTPDLRERLENLRKKPENI |
| | PQPISNTSRANLNKLLTDYTEMKKAILHVYWEEFQKDPVGLMSRVAQPAPKNIDQ |
| | RKLIPVKDGNERLTSSGFACSQCCQPLYVYKLEQVNDKGKPHTNYFGRCNVSEHE |
| | RLILLSPHKPEANDELVTYSLGKFGQRALDFYSIHVTRESNHPVKPLEQIGGNSC |
| | ASGPVGKALSDACMGAVASFLTKYQDIILEHQKVIKKNEKRLANLKDIASANGLA |
| | FPKITLPPQPHTKEGIEAYNNVVAQIVIWVNLNLWQKLKIGRDEAKPLQRLKGFP |
| | SFPLVERQANEVDWWDMVCNVKKLINEKKEDGKVFWQNLAGYKRQEALRPYLSSE |
| | EDRKKGKKFARYQFGDLLLHLEKKHGEDWGKVYDEAWERIDKKVEGLSKHIKLEE |
| | ERRSEDAQSKAALTDWLRAKASFVIEGLKEADKDEFCRCELKLQKWYGDLRGKPF |
| | AIEAENSILDISGFSKQYNCAFIWQKDGVKKLNLYLIINYFKGGKLRFKKIKPEA |
| | FEANRFYTVINKKSGEIVPMEVNFNFDDPNLIILPLAFGKRQGREFIWNDLLSLE |
| | TGSLKLANGRVIEKTLYNRRTRQDEPALFVALTFERREVLDSSNIKPMNLIGIDR |
| | GENIPAVIALTDPEGCPLSRFKDSLGNPTHILRIGESYKEKQRTIQAKKEVEQRR |
| | AGGYSRKYASKAKNLADDMVRNTARDLLYYAVTQDAMLIFENLSRGFGRQGKRTF |
| | MAERQYTRMEDWLTAKLAYEGLSKTYLSKTLAQYTSKTCSNCGFTITSADYDRVL |
| | EKLKKTATGWMTTINGKELKVEGQITYYNRYKRQNVVKDLSVELDRLSEESVNND |
| | ISSWTKGRSGEALSLLKKRFSHRPVQEKFVCLNCGFETHADEQAALNIARSWLFL |
| | RSQEYKKYQTNKTTGNTDKRAFVETWQSFYRKKLKEVWKPAVTSPKKKRKVPPPL |
| | SPSLSPLLSPSLSPL (SEQ ID NO: 222) |
| 288 | MQEIKRINKIRRRLVKDSNTKKAGKTGPMKTLLVRVMTPDLRERLENLRKKPENI |
| | PQPISNTSRANLNKLLTDYTEMKKAILHVYWEEFQKDPVGLMSRVAQPAPKNIDQ |
| | RKLIPVKDGNERLTMSSGFACSQCCQPLYVYKLEQVNDKGKPHTNYFGRCNVSEH |
| | ERLILLSPHKPEANDELVTYSLGKFGQRALDFYSIHVTRESNHPVKPLEQIGGNS |
| | CASGPVGKALSDACMGAVASFLTKYQDIILEHQKVIKKNEKRLANLKDIASANGL |
| | AFPKITLPPQPHTKEGIEAYNNVVAQIVIWVNLNLWQKLKIGRDEAKPLQRLKGF |
| | PSFPLVERQANEVDWWDMVCNVKKLINEKKEDGKVFWQNLAGYKRQEALRPYLSS |
| | EEDRKKGKKFARYQFGDLLLHLEKKHGEDWGKVYDEAWERIDKKVEGLSKHIKLE |
| | EERRSEDAQSKAALTDWLRAKASFVIEGLKEADKDEFCRCELKLQKWYGDLRGKP |
| | FAIEAENSILDISGFSKQYNCAFIWQKDGVKKLNLYLIINYFKGGKLRFKKIKPE |
| | AFEANRFYTVINKKSGEIVPMEVNFNFDDPNLIILPLAFGKRQGREFIWNDLLSL |
| | ETGSLKLANGRVIEKTLYNRRTRQDEPALFVALTFERREVLDSSNIKPMNLIGID |
| | RGENIPAVIALTDPEGCPLSRFKDSLGNPTHILRIGESYKEKQRTIQAKKEVEQR |
| | RAGGYSRKYASKAKNLADDMVRNTARDLLYYAVTQDAMLIFENLSRGFGRQGKRT |
| | FMAERQYTRMEDWLTAKLAYEGLSKTYLSKTLAQYTSKTCSNCGFTITSADYDRV |
| | LEKLKKTATGWMTTINGKELKVEGQITYYNRYKRQNVVKDLSVELDRLSEESVNN |
| | DISSWTKGRSGEALSLLKKRFSHRPVQEKFVCLNCGFETHADEQAALNIARSWLF |
| | LRSQEYKKYQTNKTTGNTDKRAFVETWQSFYRKKLKEVWKPAVTSPKKKRKVPPP |
| | RGKGGKGLGKGGAKRHRK (SEQ ID NO: 223) |
| 290 | MQEIKRINKIRRRLVKDSNTKKAGKTGPMKTLLVRVMTPDLRERLENLRKKPENI |
| | PQPISNTSRANLNKLLTDYTEMKKAILHVYWEEFQKDPVGLMSRVAQPAPKNIDQ |
| | RKLIPVKDGNERLTSSGFACSQCCQPLYVYKLEQVNDKGKPHTNYFGRCNVSEHE |
| | RLILLSPHKPEANDELVTYSLGKFGQRALDFYSIHVTRESNHPVKPLEQIGGNSC |
| | ASGPVGKALSDACMGAVASFLTKYQDIILEHQKVIKKNEKRLANLKDIASANGLA |
| | FPKITLPPQPHTKEGIEAYNNVVAQIVIWVNLNLWQKLKIGRDEAKPLQRLKGFP |
| | SFPLVERQANEVDWWDMVCNVKKLINEKKEDGKVFWQNLAGYKRQEALRPYLSSE |
| | EDRKKGKKFARYQFGDLLLHLEKKHGEDWGKVYDEAWERIDKKVEGLSKHIKLEE |
| | ERRSEDAQSKAALTDWLRAKASFVIEGLKEADKDEFCRCELKLQKWYGDLRGKPF |
| | AIEAENSILDISGFSKQYNCAFIWQKDGVKKLNLYLIINYFKGGKLRFKKIKPEA |
| | FEANRFYTVINKKSGEIVPMEVNFNFDDPNLIILPLAFGKRQGREFIWNDLLSLE |
| | TGSLKLANGRVIEKTLYNRRTRQDEPALFVALTFERREVLDSSNIKPMNLIGIDR |
| | GENIPAVIALTDPEGCPLSRFKDSLGNPTHILRIGESYKEKQRTIQAKKEVEQRR |
| | AGGYSRKYASKAKNLADDMVRNTARDLLYYAVTQDAMLIFENLSRGFGRQGKRTF |
| | MAERQYTRMEDWLTAKLAYEGLSKTYLSKTLAQYTSKTCSNCGFTITSADYDRVL |
| | EKLKKTATGWMTTINGKELKVEGQITYYNRYKRQNVVKDLSVELDRLSEESVNND |
| | ISSWTKGRSGEALSLLKKRFSHRPVQEKFVCLNCGFETHADEQAALNIARSWLFL |
| | RSQEYKKYQTNKTTGNTDKRAFVETWQSFYRKKLKEVWKPAVTSPKKKRKVPPPS |
| | RRRKANPTKLSENAKKLAKEVEN (SEQ ID NO: 224) |
| 291 | MQEIKRINKIRRRLVKDSNTKKAGKTGPMKTLLVRVMTPDLRERLENLRKKPENI |
| | PQPISNTSRANLNKLLTDYTEMKKAILHVYWEEFQKDPVGLMSRVAQPAPKNIDQ |
| | RKLIPVKDGNERLTSSGFACSQCCQPLYVYKLEQVNDKGKPHTNYFGRCNVSEHE |
| | RLILLSPHKPEANDELVTYSLGKFGQRALDFYSIHVTRESNHPVKPLEQIGGNSC |
| | ASGPVGKALSDACMGAVASFLTKYQDIILEHQKVIKKNEKRLANLKDIASANGLA |
| | FPKITLPPQPHTKEGIEAYNNVVAQIVIWVNLNLWQKLKIGRDEAKPLQRLKGFP |
| | SFPLVERQANEVDWWDMVCNVKKLINEKKEDGKVFWQNLAGYKRQEALRPYLSSE |
| | EDRKKGKKFARYQFGDLLLHLEKKHGEDWGKVYDEAWERIDKKVEGLSKHIKLEE |
| | ERRSEDAQSKAALTDWLRAKASFVIEGLKEADKDEFCRCELKLQKWYGDLRGKPF |
| | AIEAENSILDISGFSKQYNCAFIWQKDGVKKLNLYLIINYFKGGKLRFKKIKPEA |
| | FEANRFYTVINKKSGEIVPMEVNFNFDDPNLIILPLAFGKRQGREFIWNDLLSLE |
| | TGSLKLANGRVIEKTLYNRRTRQDEPALFVALTFERREVLDSSNIKPMNLIGIDR |
| | GENIPAVIALTDPEGCPLSRFKDSLGNPTHILRIGESYKEKQRTIQAKKEVEQRR |
| | AGGYSRKYASKAKNLADDMVRNTARDLLYYAVTQDAMLIFENLSRGFGRQGKRTF |
| | MAERQYTRMEDWLTAKLAYEGLSKTYLSKTLAQYTSKTCSNCGFTITSADYDRVL |
| | EKLKKTATGWMTTINGKELKVEGQITYYNRYKRQNVVKDLSVELDRLSEESVNND |
| | ISSWTKGRSGEALSLLKKRFSHRPVQEKFVCLNCGFETHADEQAALNIARSWLFL |
| | RSQEYKKYQTNKTTGNTDKRAFVETWQSFYRKKLKEVWKPAVTSPKKKRKVPPPP |
| | AAKRVKLD (SEQ ID NO: 225) |
| 293 | MQEIKRINKIRRRLVKDSNTKKAGKTGPMKTLLVRVMTPDLRERLENLRKKPENI |
| | PQPISNTSRANLNKLLTDYTEMKKAILHVYWEEFQKDPVGLMSRVAQPAPKNIDQ |
| | RKLIPVKDGNERLTSSGFACSQCCQPLYVYKLEQVNDKGKPHTNYFGRCNVSEHE |
| | RLILLSPHKPEANDELVTYSLGKFGQRALDFYSIHVTRESNHPVKPLEQIGGNSC |
| | ASGPVGKALSDACMGAVASFLTKYQDIILEHQKVIKKNEKRLANLKDIASANGLA |
| | FPKITLPPQPHTKEGIEAYNNVVAQIVIWVNLNLWQKLKIGRDEAKPLQRLKGFP |
| | SFPLVERQANEVDWWDMVCNVKKLINEKKEDGKVFWQNLAGYKRQEALRPYLSSE |
| | EDRKKGKKFARYQFGDLLLHLEKKHGEDWGKVYDEAWERIDKKVEGLSKHIKLEE |
| | ERRSEDAQSKAALTDWLRAKASFVIEGLKEADKDEFCRCELKLQKWYGDLRGKPF |
| | AIEAENSILDISGFSKQYNCAFIWQKDGVKKLNLYLIINYFKGGKLRFKKIKPEA |
| | FEANRFYTVINKKSGEIVPMEVNFNFDDPNLIILPLAFGKRQGREFIWNDLLSLE |
| | TGSLKLANGRVIEKTLYNRRTRQDEPALFVALTFERREVLDSSNIKPMNLIGIDR |
| | GENIPAVIALTDPEGCPLSRFKDSLGNPTHILRIGESYKEKQRTIQAKKEVEQRR |
| | AGGYSRKYASKAKNLADDMVRNTARDLLYYAVTQDAMLIFENLSRGFGRQGKRTF |
| | MAERQYTRMEDWLTAKLAYEGLSKTYLSKTLAQYTSKTCSNCGFTITSADYDRVL |
| | EKLKKTATGWMTTINGKELKVEGQITYYNRYKRQNVVKDLSVELDRLSEESVNND |
| | ISSWTKGRSGEALSLLKKRFSHRPVQEKFVCLNCGFETHADEQAALNIARSWLFL |
| | RSQEYKKYQTNKTTGNTDKRAFVETWQSFYRKKLKEVWKPAVTSPKKKRKVPPPK |
| | RSFSKAF (SEQ ID NO: 226) |
| 300 | MQEIKRINKIRRRLVKDSNTKKAGKTGPMKTLLVRVMTPDLRERLENLRKKPENI |
| | PQPISNTSRANLNKLLTDYTEMKKAILHVYWEEFQKDPVGLMSRVAQPAPKNIDQ |
| | RKLIPVKDGNERLTSSGFACSQCCQPLYVYKLEQVNDKGKPHTNYFGRCNVSEHE |
| | RLILLSPHKPEANDELVTYSLGKFGQRALDFYSIHVTRESNHPVKPLEQIGGNSC |
| | ASGPVGKALSDACMGAVASFLTKYQDIILEHQKVIKKNEKRLANLKDIASANGLA |
| | FPKITLPPQPHTKEGIEAYNNVVAQIVIWVNLNLWQKLKIGRDEAKPLQRLKGFP |
| | SFPLVERQANEVDWWDMVCNVKKLINEKKEDGKVFWQNLAGYKRQEALRPYLSSE |
| | EDRKKGKKFARYQFGDLLLHLEKKHGEDWGKVYDEAWERIDKKVEGLSKHIKLEE |
| | ERRSEDAQSKAALTDWLRAKASFVIEGLKEADKDEFCRCELKLQKWYGDLRGKPF |
| | AIEAENSILDISGFSKQYNCAFIWQKDGVKKLNLYLIINYFKGGKLRFKKIKPEA |
| | FEANRFYTVINKKSGEIVPMEVNFNFDDPNLIILPLAFGKRQGREFIWNDLLSLE |
| | TGSLKLANGRVIEKTLYNRRTRQDEPALFVALTFERREVLDSSNIKPMNLIGIDR |
| | GENIPAVIALTDPEGCPLSRFKDSLGNPTHILRIGESYKEKQRTIQAKKEVEQRR |
| | AGGYSRKYASKAKNLADDMVRNTARDLLYYAVTQDAMLIFENLSRGFGRQGKRTF |
| | MAERQYTRMEDWLTAKLAYEGLSKTYLSKTLAQYTSKTCSNCGFTITSADYDRVL |
| | EKLKKTATGWMTTINGKELKVEGQITYYNRYKRQNVVKDLSVELDRLSEESVNND |
| | ISSWTKGRSGEALSLLKKRFSHRPVQEKFVCLNCGFETHADEQAALNIARSWLFL |
| | RSQEYKKYQTNKTTGNTDKRAFVETWQSFYRKKLKEVWKPAVTSPKKKRKVPPPK |
| | RGINDRNFWRGENERKTR (SEQ ID NO: 227) |
| 492 | MAPKKKRKVSRMQEIKRINKIRRRLVKDSNTKKAGKTGPMKTLLVRVMTPDLRER |
| | LENLRKKPENIPQPISNTSRANLNKLLTDYTEMKKAILHVYWEEFQKDPVGLMSR |
| | VAQPAPKNIDQRKLIPVKDGNERLTSSGFACSQCCQPLYVYKLEQVNDKGKPHTN |
| | YFGRCNVSEHERLILLSPHKPEANDELVTYSLGKFGQRALDFYSIHVTRESNHPV |
| | KPLEQIGGNSCASGPVGKALSDACMGAVASFLTKYQDIILEHQKVIKKNEKRLAN |
| | LKDIASANGLAFPKITLPPQPHTKEGIEAYNNVVAQIVIWVNLNLWQKLKIGRDE |
| | AKPLQRLKGFPSFPLVERQANEVDWWDMVCNVKKLINEKKEDGKVFWQNLAGYKR |
| | QEALRPYLSSEEDRKKGKKFARYQFGDLLLHLEKKHGEDWGKVYDEAWERIDKKV |
| | EGLSKHIKLEEERRSEDAQSKAALTDWLRAKASFVIEGLKEADKDEFCRCELKLQ |
| | KWYGDLRGKPFAIEAENSILDISGFSKQYNCAFIWQKDGVKKLNLYLIINYFKGG |
| | KLRFKKIKPEAFEANRFYTVINKKSGEIVPMEVNFNFDDPNLIILPLAFGKRQGR |
| | EFIWNDLLSLETGSLKLANGRVIEKTLYNRRTRQDEPALFVALTFERREVLDSSN |
| | IKPMNLIGIDRGENIPAVIALTDPEGCPLSRFKDSLGNPTHILRIGESYKEKQRT |
| | IQAKKEVEQRRAGGYSRKYASKAKNLADDMVRNTARDLLYYAVTQDAMLIFENLS |
| | RGFGRQGKRTFMAERQYTRMEDWLTAKLAYEGLSKTYLSKTLAQYTSKTCSNCGF |
| | TITSADYDRVLEKLKKTATGWMTTINGKELKVEGQITYYNRYKRQNVVKDLSVEL |
| | DRLSEESVNNDISSWTKGRSGEALSLLKKRFSHRPVQEKFVCLNCGFETHADEQA |
| | ALNIARSWLFLRSQEYKKYQTNKTTGNTDKRAFVETWQSFYRKKLKEVWKPAVTS |
| | PKKKRKVPPPPKKKRKV (SEQ ID NO: 228) |
| 493 | MAPKKKRKVSRMQEIKRINKIRRRLVKDSNTKKAGKTGPMKTLLVRVMTPDLRER |
| | LENLRKKPENIPQPISNTSRANLNKLLTDYTEMKKAILHVYWEEFQKDPVGLMSR |
| | VAQPAPKNIDQRKLIPVKDGNERLTSSGFACSQCCQPLYVYKLEQVNDKGKPHTN |
| | YFGRCNVSEHERLILLSPHKPEANDELVTYSLGKFGQRALDFYSIHVTRESNHPV |
| | KPLEQIGGNSCASGPVGKALSDACMGAVASFLTKYQDIILEHQKVIKKNEKRLAN |
| | LKDIASANGLAFPKITLPPQPHTKEGIEAYNNVVAQIVIWVNLNLWQKLKIGRDE |
| | AKPLQRLKGFPSFPLVERQANEVDWWDMVCNVKKLINEKKEDGKVFWQNLAGYKR |
| | QEALRPYLSSEEDRKKGKKFARYQFGDLLLHLEKKHGEDWGKVYDEAWERIDKKV |
| | EGLSKHIKLEEERRSEDAQSKAALTDWLRAKASFVIEGLKEADKDEFCRCELKLQ |
| | KWYGDLRGKPFAIEAENSILDISGFSKQYNCAFIWQKDGVKKLNLYLIINYFKGG |
| | KLRFKKIKPEAFEANRFYTVINKKSGEIVPMEVNFNFDDPNLIILPLAFGKRQGR |
| | EFIWNDLLSLETGSLKLANGRVIEKTLYNRRTRQDEPALFVALTFERREVLDSSN |
| | IKPMNLIGIDRGENIPAVIALTDPEGCPLSRFKDSLGNPTHILRIGESYKEKQRT |
| | IQAKKEVEQRRAGGYSRKYASKAKNLADDMVRNTARDLLYYAVTQDAMLIFENLS |
| | RGFGRQGKRTFMAERQYTRMEDWLTAKLAYEGLSKTYLSKTLAQYTSKTCSNCGF |
| | TITSADYDRVLEKLKKTATGWMTTINGKELKVEGQITYYNRYKRQNVVKDLSVEL |
| | DRLSEESVNNDISSWTKGRSGEALSLLKKRFSHRPVQEKFVCLNCGFETHADEQA |
| | ALNIARSWLFLRSQEYKKYQTNKTTGNTDKRAFVETWQSFYRKKLKEVWKPAVTS |
| | PKKKRKVPPPPAAKRVKLD (SEQ ID NO: 229) |

TABLE 9
Nuclear localization sequence list

| CasX | NLS | DNA Sequence | Amino Acid Sequence |
|---|---|---|---|
| 278, 279, | SV40 | CCAAAGAAGAAGCGGAAGGTC | PKKKRKV |
| 280, 492, | | (SEQ ID NO: 230) | (SEQ ID NO: 145) |
| 493 | | | |
| 285 | SynthNLS3 | CACAAGAAGAAACATCCAGACGC | HKKKHPDASVNFSEFSK |
| | | ATCAGTCAACTTTAGCGAGTTCA | (SEQ ID NO: 176) |
| | | GTAAA (SEQ ID NO: 231) | |
| 286 | SynthNLS4 | CAGCGCCCTGGGCCTTACGATAG | QRPGPYDRPQRPGPYDRP |
| | | GCCGCAAAGACCCGGACCGTATG | (SEQ ID NO: 177) |
| | | ATCGCCCT | |
| | | (SEQ ID NO: 232) | |
| 287 | SynthNLS5 | CTCAGCCCGAGTCTTAGTCCACT | LSPSLSPLLSPSLSPL |
| | | GCTTTCCCCGTCCCTGTCTCCAC | (SEQ ID NO: 178) |
| | | TG (SEQ ID NO: 233) | |
| 288 | SynthNLS6 | CGGGGCAAGGGTGGCAAGGGGCT | RGKGGKGLGKGGAKRHRK |
| | | TGGCAAGGGGGGGGCAAAGAGGC | (SEQ ID NO: 179) |
| | | ACAGGAAG | |
| | | (SEQ ID NO: 234) | |
| 290 | EGL-13 | AGCCGCCGCAGAAAAGCCAATCC | SRRRKANPTKLSENAKKLA |
| | | TACAAAACTGTCAGAAAATGCGA | KEVEN |
| | | AAAAACTTGCTAAGGAGGTGGAA | (SEQ ID NO: 172) |
| | | AAC (SEQ ID NO: 235) | |
| 291 | c-Myc | CCTGCCGCAAAGCGAGTGAAATT | PAAKRVKLD |
| | | GGAC (SEQ ID NO: 236) | (SEQ ID NO: 147) |
| 293 | Nucleolar RNA | AAGCGGTCCTTCAGTAAGGCCTT | KRSFSKAF |
| | Helicase II | T (SEQ ID NO: 237) | (SEQ ID NO: 168) |
| 300 | Influenza A | AAACGGGGAATAAACGACCGGAA | KRGINDRNFWRGENEPKTR |
| | protein | CTTCTGGCGCGGGGAAAACGAGC | (SEQ ID NO: 166) |
| | | GCAAAACCCGA | |
| | | (SEQ ID NO: 238) | |

### Example 5: Design and Generation of CasX Constructs 387, 395, 485-491, and 494

[0880] In order to generate CasX 395, CasX 485, CasX 486, CasX 487, the codon optimized CasX 119 (based on the CasX 37 construct of Example 2, encoding Planctomycetes CasX SEQ ID NO: 2, with a A708K substitution and a [P793] deletion with fused NLS, and linked guide and non-targeting sequences), CasX 435, CasX 438, and CasX 484 (each based on CasX 119 construct of Example 2 encoding Planctomycetes CasX SEQ ID NO: 2, with a L379R substitution, a A708K substitution, and a [P793] deletion with fused NLS, and linked guide and non-targeting sequences) were cloned respectively into a 4kb staging vector comprising a KanR marker, colE1 ori, and CasX with fused NLS (pStx1) using standard cloning methods. Gibson primers were designed to amplify the CasX SEQ ID NO: 1 Helical I domain from amino acid 192-331 in its own vector to replace this corresponding region (aa 193-332) on CasX 119, CasX 435, CasX 438, and CasX 484 in pStx1 respectively. The Helical I domain from CasX SEQ ID NO: 1 was amplified with primers oIC768 and oIC784 using Q5 DNA polymerase (New England BioLabs Cat #M0491L) according to the manufacturer's protocol. The destination vector containing the desired CasX variant was amplified with primers oIC765 and oIC764 using Q5 DNA polymerase (New England BioLabs Cat #M0491L) according to the manufacturer's protocol. The two fragments were purified by gel extraction from a 1% agarose gel (Gold Bio Cat #A-201-500) using Zymoclean™ Gel DNA Recovery Kit (Zymo Research Cat #D4002) according to the manufacturer's protocol. The insert and backbone fragments were then pieced together using Gibson Assembly® (New England BioLabs Cat #E2621S) following the manufacturer's protocol. Assembled products in the pStx1 staging vector were transformed into chemically-competent Turbo Competent E. coli bacterial cells, plated on LB-Agar plates (LB: Teknova Cat #L9315, Agar: Quartzy Cat #214510) containing kanamycin and incubated at 37° C. Individual colonies were picked and miniprepped using Qiagen QIAprep® Spin Miniprep Kit (Qiagen Cat #27104) following the manufacturer's protocol. The resultant plasmids were sequenced using Sanger sequencing to ensure correct assembly. Correct clones were then cut and pasted into a mammalian expression plasmid (see FIG. 5) using standard cloning methods. The resultant plasmids were sequenced using Sanger sequencing to ensure correct assembly.

[0881] Sequences encoding the targeting spacer sequences that target the gene of interest were designed based on CasX PAM locations. Targeting spacer sequence DNA was ordered as single-stranded DNA (ssDNA) oligos (Integrated DNA Technologies) consisting of the targeting sequence and the reverse complement of this sequence. These two oligos were annealed together and cloned into pStX individually or in bulk by Golden Gate assembly using T4 DNA Ligase (New England BioLabs Cat #M0202L) and an appropriate restriction enzyme for the plasmid. Golden Gate products were transformed into chemically or electro-competent cells such as NEB Turbo competent E. coli (NEB Cat #C2984I), plated on LB-Agar plates (LB: Teknova Cat #L9315, Agar: Quartzy Cat #214510) containing carbenicillin and incubated at 37° C. Individual colonies were picked and miniprepped using Qiagen QIAprep® Spin Miniprep Kit (Qiagen Cat #27104) following the manufacturer's protocol. The resultant plasmids were sequenced using Sanger sequencing to ensure correct ligation.

[0882] In order to generate CasX 488, CasX 489, CasX 490, and CasX 491 (sequences in Table 10), the codon optimized CasX 119 (based on the CasX 37 construct of Example 2, encoding Planctomycetes CasX SEQ ID NO: 2, with a A708K substitution and a [P793] deletion with fused NLS, and linked guide and non-targeting sequences), CasX 435, CasX 438, and CasX 484 (each based on CasX119 construct of Example 2 encoding Planctomycetes CasX SEQ ID NO: 2, with a L379R substitution, a A708K substitution, and a [P793] deletion with fused NLS, and linked guide and non-targeting sequences) were cloned respectively into a 4kb staging vector that was made up of a KanR marker, colE1 ori, and STX with fused NLS (pStx1) using standard cloning methods. Gibson primers were designed to amplify the CasX Stx1 NTSB domain from amino acid 101-191 and Helical I domain from amino acid 192-331 in its own vector to replace this similar region (aa 103-332) on CasX 119, CasX 435, CasX 438, and CasX 484 in pStx1 respectively. The NTSB and Helical I domain from CasX SEQ ID NO: 1 were amplified with primers oIC766 and oIC784 using Q5 DNA polymerase (New England BioLabs Cat #M0491L) according to the manufacturer's protocol. The destination vector containing the desired CasX variant was amplified with primers oIC762 and oIC765 using Q5 DNA polymerase (New England BioLabs Cat #M0491L) according to the manufacturer's protocol. The two fragments were purified by gel extraction from a 1% agarose gel (Gold Bio Cat #A-201-500) using Zymoclean™ Gel DNA Recovery Kit (Zymo Research Cat #D4002) according to the manufacturer's protocol. The insert and backbone fragments were then pieced together using Gibson Assembly® (New England BioLabs Cat #E2621S) following the manufacturer's protocol. Assembled products in the pStx1 staging vector were transformed into chemically-competent Turbo Competent E. coli bacterial cells, plated on LB-Agar plates (LB: Teknova Cat #L9315, Agar: Quartzy Cat #214510) containing kanamycin and incubated at 37° C. Individual colonies were picked and miniprepped using Qiagen QIAprep® Spin Miniprep Kit (Qiagen Cat #27104) following the manufacturer's protocol. The resultant plasmids were sequenced using Sanger sequencing to ensure correct assembly. Correct clones were then cut and pasted into a mammalian expression plasmid (see FIG. 5) using standard cloning methods. The resultant plasmids were sequenced using Sanger sequencing to ensure correct assembly. Sequences encoding the targeting spacer sequences that target the gene of interest were designed based on CasX PAM locations. Targeting spacer sequence DNA was ordered as single-stranded DNA (ssDNA) oligos (Integrated DNA Technologies) consisting of the targeting sequence and the reverse complement of this sequence. These two oligos were annealed together and cloned into pStX individually or in bulk by Golden Gate assembly using T4 DNA Ligase (New England BioLabs Cat #M0202L) and an appropriate restriction enzyme for the plasmid. Golden Gate products were transformed into chemically or electro-competent cells such as NEB Turbo competent E. coli (NEB Cat #C2984I), plated on LB-Agar plates (LB: Teknova Cat #L9315, Agar: Quartzy Cat #214510) containing carbenicillin and incubated at 37° C. Individual colonies were picked and miniprepped using Qiagen QIAprep® Spin Miniprep Kit (Qiagen Cat #27104) and following the manufacturer's protocol. The resultant plasmids were sequenced using Sanger sequencing to ensure correct ligation.

[0883] In order to generate CasX 387 and CasX 494 (sequences in Table 10), the codon optimized CasX 119 (based on the CasX 37 construct of Example 2, encoding Planctomycetes CasX SEQ ID NO: 2, with a A708K substitution and a [P793] deletion with fused NLS, and linked guide and non-targeting sequences) and CasX 484 (based on CasX119 construct of Example 2 encoding Planctomycetes CasX SEQ ID NO: 2, with a L379R substitution, a A708K substitution, and a [P793] deletion with fused NLS, and linked guide and non-targeting sequences) were cloned respectively into a 4kb staging vector that was made up of a KanR marker, colE1 ori, and STX with fused NLS (pStx1) using standard cloning methods. Gibson primers were designed to amplify the CasX Stx1 NTSB domain from amino acid 101-191 in its own vector to replace this similar region (aa 103-192) on CasX 119 and CasX 484 in pStx1 respectively. The NTSB domain from CasX Stx1 was amplified with primers oIC766 and oIC767 using Q5 DNA polymerase (New England BioLabs Cat #M0491L) according to the manufacturer's protocol. The destination vector containing the desired CasX variant was amplified with primers oIC763 and oIC762 using Q5 DNA polymerase (New England BioLabs Cat #M0491L) according to the manufacturer's protocol. The two fragments were purified by gel extraction from a 1% agarose gel (Gold Bio Cat #A-201-500) using Zymoclean™ Gel DNA Recovery Kit (Zymo Research Cat #D4002) according to the manufacturer's protocol. The insert and backbone fragments were then pieced together using Gibson Assembly® (New England BioLabs Cat #E2621S) following the manufacturer's protocol. Assembled products in the pStx1 staging vector were transformed into chemically-competent Turbo Competent E. coli bacterial cells, plated on LB-Agar plates (LB: Teknova Cat #L9315, Agar: Quartzy Cat #214510) containing kanamycin and incubated at 37° C. Individual colonies were picked and miniprepped using Qiagen Qiaprep® spin Miniprep Kit (Qiagen Cat #27104) following the manufacturer's protocol. The resultant plasmids were sequenced using Sanger sequencing to ensure correct assembly. Correct clones were then cut and pasted into a mammalian expression plasmid (see FIG. 5) using standard cloning methods. The resultant plasmids were sequenced using Sanger sequencing to ensure correct assembly. Sequences encoding the targeting sequences that target the gene of interest were designed based on CasX PAM locations. Targeting sequence DNA was ordered as single-stranded DNA (ssDNA) oligos (Integrated DNA Technologies) consisting of the targeting sequence and the reverse complement of this sequence. These two oligos were annealed together and cloned into pStX individually or in bulk by Golden Gate assembly using T4 DNA Ligase (New England BioLabs Cat #M0202L) and an appropriate restriction enzyme for the plasmid. Golden Gate products were transformed into chemically or electro-competent cells such as NEB Turbo competent E. coli (NEB Cat #C2984I), plated on LB-Agar plates (LB: Teknova Cat #L9315, Agar: Quartzy Cat #214510) containing carbenicillin and incubated at 37° C. Individual colonies were picked and miniprepped using Qiagen Qiaprep® spin Miniprep Kit (Qiagen Cat #27104) and following the manufacturer's protocol. The resultant plasmids were sequenced using Sanger sequencing to ensure correct ligation. Sequences of the resulting constructs are listed in Table 10.

TABLE 10
Sequences of CasX 395 and 485-491

| Construct | DNA Sequence | Amino Acid Sequence |
|---|---|---|
| CasX 387 | (SEQ ID NO: 239) | MAPKKKRKVSRQEIKRINKIRRRLVKDSNTKKAGKTGPMKTLLVRVM |
| | | TPDLRERLENLRKKPENIPQPISNTSRANLNKLLTDYTEMKKAILHV |
| | | YWEEFQKDPVGLMSRVAQPASKKIDQNKLKPEMDEKGNLTTAGFACS |
| | | QCGQPLFVYKLEQVSEKGKAYTNYFGRCNVAEHEKLILLAQLKPEKD |
| | | SDEAVTYSLGKFGQRALDFYSIHVTRESNHPVKPLEQIGGNSCASGP |
| | | VGKALSDACMGAVASFLTKYQDIILEHQKVIKKNEKRLANLKDIASA |
| | | NGLAFPKITLPPQPHTKEGIEAYNNVVAQIVIWVNLNLWQKLKIGRD |
| | | EAKPLQRLKGFPSFPLVERQANEVDWWDMVCNVKKLINEKKEDGKVF |
| | | WQNLAGYKRQEALRPYLSSEEDRKKGKKFARYQFGDLLLHLEKKHGE |
| | | DWGKVYDEAWERIDKKVEGLSKHIKLEEERRSEDAQSKAALTDWLRA |
| | | KASFVIEGLKEADKDEFCRCELKLQKWYGDLRGKPFAIEAENSILDI |
| | | SGFSKQYNCAFIWQKDGVKKLNLYLIINYFKGGKLRFKKIKPEAFEA |
| | | NRFYTVINKKSGEIVPMEVNFNFDDPNLIILPLAFGKRQGREFIWND |
| | | LLSLETGSLKLANGRVIEKTLYNRRTRQDEPALFVALTFERREVLDS |
| | | SNIKPMNLIGIDRGENIPAVIALTDPEGCPLSRFKDSLGNPTHILRI |
| | | GESYKEKQRTIQAKKEVEQRRAGGYSRKYASKAKNLADDMVRNTARD |
| | | LLYYAVTQDAMLIFENLSRGFGRQGKRTFMAERQYTRMEDWLTAKLA |
| | | YEGLSKTYLSKTLAQYTSKTCSNCGFTITSADYDRVLEKLKKTATGW |
| | | MTTINGKELKVEGQITYYNRYKRQNVVKDLSVELDRLSEESVNNDIS |
| | | SWTKGRSGEALSLLKKRFSHRPVQEKFVCLNCGFETHADEQAALNIA |
| | | RSWLFLRSQEYKKYQTNKTTGNTDKRAFVETWQSFYRKKLKEVWKPA |
| | | VTSPKKKRKV (SEQ ID NO: 240) |
| CasX 395 | (SEQ ID NO: 241) | MAPKKKRKVSRQEIKRINKIRRRLVKDSNTKKAGKTGPMKTLLVRVM |
| | | TPDLRERLENLRKKPENIPQPISNTSRANLNKLLTDYTEMKKAILHV |
| | | YWEEFQKDPVGLMSRVAQPAPKNIDQRKLIPVKDGNERLTSSGFACS |
| | | QCCQPLYVYKLEQVNDKGKPHTNYFGRCNVSEHERLILLSPHKPEAN |
| | | DELVTYSLGKFGQRALDFYSIHVTKESTHPVKPLAQIAGNRYASGPV |
| | | GKALSDACMGTIASFLSKYQDIIIEHQKVVKGNQKRLESLRELAGKE |
| | | NLEYPSVTLPPQPHTKEGVDAYNEVIARVRMWVNLNLWQKLKLSRDD |
| | | AKPLLRLKGFPSFPLVERQANEVDWWDMVCNVKKLINEKKEDGKVFW |
| | | QNLAGYKRQEALRPYLSSEEDRKKGKKFARYQFGDLLLHLEKKHGED |
| | | WGKVYDEAWERIDKKVEGLSKHIKLEEERRSEDAQSKAALTDWLRAK |
| | | ASFVIEGLKEADKDEFCRCELKLQKWYGDLRGKPFAIEAENSILDIS |
| | | GFSKQYNCAFIWQKDGVKKLNLYLIINYFKGGKLRFKKIKPEAFEAN |
| | | RFYTVINKKSGEIVPMEVNFNFDDPNLIILPLAFGKRQGREFIWNDL |
| | | LSLETGSLKLANGRVIEKTLYNRRTRQDEPALFVALTFERREVLDSS |
| | | NIKPMNLIGIDRGENIPAVIALTDPEGCPLSRFKDSLGNPTHILRIG |
| | | ESYKEKQRTIQAKKEVEQRRAGGYSRKYASKAKNLADDMVRNTARDL |
| | | LYYAVTQDAMLIFENLSRGFGRQGKRTFMAERQYTRMEDWLTAKLAY |
| | | EGLSKTYLSKTLAQYTSKTCSNCGFTITSADYDRVLEKLKKTATGWM |
| | | TTINGKELKVEGQITYYNRYKRQNVVKDLSVELDRLSEESVNNDISS |
| | | WTKGRSGEALSLLKKRFSHRPVQEKFVCLNCGFETHADEQAALNIAR |
| | | SWLFLRSQEYKKYQTNKTTGNTDKRAFVETWQSFYRKKLKEVWKPAV |
| | | TSPKKKRKVTSPKKKRKV (SEQ ID NO: 242) |
| CasX 485 | (SEQ ID NO: 243) | MAPKKKRKVSRQEIKRINKIRRRLVKDSNTKKAGKTGPMKTLLVRVM |
| | | TPDLRERLENLRKKPENIPQPISNTSRANLNKLLTDYTEMKKAILHV |
| | | YWEEFQKDPVGLMSRVAQPAPKNIDQRKLIPVKDGNERLTSSGFACS |
| | | QCCQPLYVYKLEQVNDKGKPHTNYFGRCNVSEHERLILLSPHKPEAN |
| | | DELVTYSLGKFGQRALDFYSIHVTKESTHPVKPLAQIAGNRYASGPV |
| | | GKALSDACMGTIASFLSKYQDIIIEHQKVVKGNQKRLESLRELAGKE |
| | | NLEYPSVTLPPQPHTKEGVDAYNEVIARVRMWVNLNLWQKLKLSRDD |
| | | AKPLLRLKGFPSFPLVERQANEVDWWDMVCNVKKLINEKKEDGKVFW |
| | | QNLAGYKRQEALRPYLSSEEDRKKGKKFARYQLGDLLLHLEKKHGED |
| | | WGKVYDEAWERIDKKVEGLSKHIKLEEERRSEDAQSKAALTDWLRAK |
| | | ASFVIEGLKEADKDEFCRCELKLQKWYGDLRGKPFAIEAENSILDIS |
| | | GFSKQYNCAFIWQKDGVKKLNLYLIINYFKGGKLRFKKIKPEAFEAN |
| | | RFYTVINKKSGEIVPMEVNFNFDDPNLIILPLAFGKRQGREFIWNDL |
| | | LSLETGSLKLANGRVIEKTLYNRRTRQDEPALFVALTFERREVLDSS |
| | | NIKPMNLIGVDRGENIPAVIALTDPEGCPLSRFKDSLGNPTHILRIG |
| | | ESYKEKQRTIQAKKEVEQRRAGGYSRKYASKAKNLADDMVRNTARDL |
| | | LYYAVTQDAMLIFENLSRGFGRQGKRTFMAERQYTRMEDWLTAKLAY |
| | | EGLSKTYLSKTLAQYTSKTCSNCGFTITSADYDRVLEKLKKTATGWM |
| | | TTINGKELKVEGQITYYNRRKRQNVVKDLSVELDRLSEESVNNDISS |
| | | WTKGRSGEALSLLKKRFSHRPVQEKFVCLNCGFETHADEQAALNIAR |
| | | SWLFLRSQEYKKYQTNKTTGNTDKRAFVETWQSFYRKKLKEVWKPAV |
| | | TSPKKKRKV (SEQ ID NO: 244) |
| CasX 486 | (SEQ ID NO: 245) | MAPKKKRKVSRQEIKRINKIRRRLVKDSNTKKAGKTGPMKTLLVRVM |
| | | TPDLRERLENLRKKPENIPQPISNTSRANLNKLLTDYTEMKKAILHV |
| | | YWEEFQKDPVGLMSRVAQPAPKNIDQRKLIPVKDGNERLTSSGFACS |
| | | QCCQPLYVYKLEQVNDKGKPHTNYFGRCNVSEHERLILLSPHKPEAN |
| | | DELVTYSLGKFGQRALDFYSIHVTKESTHPVKPLAQIAGNRYASGPV |
| | | GKALSDACMGTIASFLSKYQDIIIEHQKVVKGNQKRLESLRELAGKE |
| | | NLEYPSVTLPPQPHTKEGVDAYNEVIARVRMWVNLNLWQKLKLSRDD |
| | | AKPLLRLKGFPSFPLVERQANEVDWWDMVCNVKKLINEKKEDGKVFW |
| | | QNLAGYKRQEALRPYLSSEEDRKKGKKFARYQLGDLLKHLEKKHGED |
| | | WGKVYDEAWERIDKKVEGLSKHIKLEEERRSEDAQSKAALTDWLRAK |
| | | ASFVIEGLKEADKDEFCRCELKLQKWYGDLRGKPFAIEAENSILDIS |
| | | GFSKQYNCAFIWQKDGVKKLNLYLIINYFKGGKLRFKKIKPEAFEAN |
| | | RFYTVINKKSGEIVPMEVNFNFDDPNLIILPLAFGKRQGREFIWNDL |
| | | LSLETGSLKLANGRVIEKTLYNRRTRQDEPALFVALTFERREVLDSS |
| | | NIKPMNLIGVDRGENIPAVIALTDPEGCPLSRFKDSLGNPTHILRIG |
| | | ESYKEKQRTIQAKKEVEQRRAGGYSRKYASKAKNLADDMVRNTARDL |
| | | LYYAVTQDAMLIFENLSRGFGRQGKRTFMAERQYTRMEDWLTAKLAY |
| | | EGLSKTYLSKTLAQYTSKTCSNCGFTITSADYDRVLEKLKKTATGWM |
| | | TTINGKELKVEGQITYYNRRKRQNVVKDLSVELDRLSEESVNNDISS |
| | | WTKGRSGEALSLLKKRFSHRPVQEKFVCLNCGFETHADEQAALNIAR |
| | | SWLFLRSQEYKKYQTNKTTGNTDKRAFVETWQSFYRKKLKEVWKPAV |
| | | TSPKKKRKV (SEQ ID NO: 246) |
| CasX 487 | (SEQ ID NO: 247) | MAPKKKRKVSRQEIKRINKIRRRLVKDSNTKKAGKTGPMKTLLVRVM |
| | | TPDLRERLENLRKKPENIPQPISNTSRANLNKLLTDYTEMKKAILHV |
| | | YWEEFQKDPVGLMSRVAQPAPKNIDQRKLIPVKDGNERLTSSGFACS |
| | | QCCQPLYVYKLEQVNDKGKPHTNYFGRCNVSEHERLILLSPHKPEAN |
| | | DELVTYSLGKFGQRALDFYSIHVTKESTHPVKPLAQIAGNRYASGPV |
| | | GKALSDACMGTIASFLSKYQDIIIEHQKVVKGNQKRLESLRELAGKE |
| | | NLEYPSVTLPPQPHTKEGVDAYNEVIARVRMWVNLNLWQKLKLSRDD |
| | | AKPLLRLKGFPSFPLVERQANEVDWWDMVCNVKKLINEKKEDGKVFW |
| | | QNLAGYKRQEALRPYLSSEEDRKKGKKFARYQLGDLLLHLEKKHGED |
| | | WGKVYDEAWERIDKKVEGLSKHIKLEEERRSEDAQSKAALTDWLRAK |
| | | ASFVIEGLKEADKDEFCRCELKLQKWYGDLRGKPFAIEAENSILDIS |
| | | GFSKQYNCAFIWQKDGVKKLNLYLIINYFKGGKLRFKKIKPEAFEAN |
| | | RFYTVINKKSGEIVPMEVNFNFDDPNLIILPLAFGKRQGREFIWNDL |
| | | LSLETGSLKLANGRVIEKTLYNRRTRQDEPALFVALTFERREVLDSS |
| | | NIKPMNLIGVDRGENIPAVIALTDPEGCPLSRFKDSLGNPTHILRIG |
| | | ESYKEKQRTIQAKKEVEQRRAGGYSRKYASKAKNLADDMVRNTARDL |
| | | LYYAVTQDAMLIFENLSRGFGRQGKRTFMAERQYTRMEDWLTAKLAY |
| | | EGLSKTYLSKTLAQYTSKTCSNCGFTITSADYDRVLEKLKKTATGWM |
| | | TTINGKELKVEGQITYYNRYKRQNVVKDLSVELDRLSEESVNNDISS |
| | | WTKGRSGEALSLLKKRFSHRPVQEKFVCLNCGFETHADEQAALNIAR |
| | | SWLFLRSQEYKKYQTNKTTGNTDKRAFVETWQSFYRKKLKEVWKPAV |
| | | TSPKKKRKV (SEQ ID NO: 248) |
| CasX 488 | (SEQ ID NO: 249) | MAPKKKRKVSRQEIKRINKIRRRLVKDSNTKKAGKTGPMKTLLVRVM |
| | | TPDLRERLENLRKKPENIPQPISNTSRANLNKLLTDYTEMKKAILHV |
| | | YWEEFQKDPVGLMSRVAQPASKKIDQNKLKPEMDEKGNLTTAGFACS |
| | | QCGQPLFVYKLEQVSEKGKAYTNYFGRCNVAEHEKLILLAQLKPEKD |
| | | SDEAVTYSLGKFGQRALDFYSIHVTKESTHPVKPLAQIAGNRYASGP |
| | | VGKALSDACMGTIASFLSKYQDIIIEHQKVVKGNQKRLESLRELAGK |
| | | ENLEYPSVTLPPQPHTKEGVDAYNEVIARVRMWVNLNLWQKLKLSRD |
| | | DAKPLLRLKGFPSFPLVERQANEVDWWDMVCNVKKLINEKKEDGKVF |
| | | WQNLAGYKRQEALRPYLSSEEDRKKGKKFARYQFGDLLLHLEKKHGE |
| | | DWGKVYDEAWERIDKKVEGLSKHIKLEEERRSEDAQSKAALTDWLRA |
| | | KASFVIEGLKEADKDEFCRCELKLQKWYGDLRGKPFAIEAENSILDI |
| | | SGFSKQYNCAFIWQKDGVKKLNLYLIINYFKGGKLRFKKIKPEAFEA |
| | | NRFYTVINKKSGEIVPMEVNFNFDDPNLIILPLAFGKRQGREFIWND |
| | | LLSLETGSLKLANGRVIEKTLYNRRTRQDEPALFVALTFERREVLDS |
| | | SNIKPMNLIGIDRGENIPAVIALTDPEGCPLSRFKDSLGNPTHILRI |
| | | GESYKEKQRTIQAKKEVEQRRAGGYSRKYASKAKNLADDMVRNTARD |
| | | LLYYAVTQDAMLIFENLSRGFGRQGKRTFMAERQYTRMEDWLTAKLA |
| | | YEGLSKTYLSKTLAQYTSKTCSNCGFTITSADYDRVLEKLKKTATGW |
| | | MTTINGKELKVEGQITYYNRYKRQNVVKDLSVELDRLSEESVNNDIS |
| | | SWTKGRSGEALSLLKKRFSHRPVQEKFVCLNCGFETHADEQAALNIA |
| | | RSWLFLRSQEYKKYQTNKTTGNTDKRAFVETWQSFYRKKLKEVWKPA |
| | | VTSPKKKRKV (SEQ ID NO: 250) |
| CasX 489 | (SEQ ID NO: 251) | MAPKKKRKVSRQEIKRINKIRRRLVKDSNTKKAGKTGPMKTLLVRVM |
| | | TPDLRERLENLRKKPENIPQPISNTSRANLNKLLTDYTEMKKAILHV |
| | | YWEEFQKDPVGLMSRVAQPASKKIDQNKLKPEMDEKGNLTTAGFACS |
| | | QCGQPLFVYKLEQVSEKGKAYTNYFGRCNVAEHEKLILLAQLKPEKD |
| | | SDEAVTYSLGKFGQRALDFYSIHVTKESTHPVKPLAQIAGNRYASGP |
| | | VGKALSDACMGTIASFLSKYQDIIIEHQKVVKGNQKRLESLRELAGK |
| | | ENLEYPSVTLPPQPHTKEGVDAYNEVIARVRMWVNLNLWQKLKLSRD |
| | | DAKPLLRLKGFPSFPLVERQANEVDWWDMVCNVKKLINEKKEDGKVF |
| | | WQNLAGYKRQEALRPYLSSEEDRKKGKKFARYQLGDLLLHLEKKHGE |
| | | DWGKVYDEAWERIDKKVEGLSKHIKLEEERRSEDAQSKAALTDWLRA |
| | | KASFVIEGLKEADKDEFCRCELKLQKWYGDLRGKPFAIEAENSILDI |
| | | SGFSKQYNCAFIWQKDGVKKLNLYLIINYFKGGKLRFKKIKPEAFEA |
| | | NRFYTVINKKSGEIVPMEVNFNFDDPNLIILPLAFGKRQGREFIWND |
| | | LLSLETGSLKLANGRVIEKTLYNRRTRQDEPALFVALTFERREVLDS |
| | | SNIKPMNLIGVDRGENIPAVIALTDPEGCPLSRFKDSLGNPTHILRI |
| | | GESYKEKQRTIQAKKEVEQRRAGGYSRKYASKAKNLADDMVRNTARD |
| | | LLYYAVTQDAMLIFENLSRGFGRQGKRTFMAERQYTRMEDWLTAKLA |
| | | YEGLSKTYLSKTLAQYTSKTCSNCGFTITSADYDRVLEKLKKTATGW |
| | | MTTINGKELKVEGQITYYNRRKRQNVVKDLSVELDRLSEESVNNDIS |
| | | SWTKGRSGEALSLLKKRFSHRPVQEKFVCLNCGFETHADEQAALNIA |
| | | RSWLFLRSQEYKKYQTNKTTGNTDKRAFVETWQSFYRKKLKEVWKPA |
| | | VTSPKKKRKV (SEQ ID NO: 252) |
| CasX 490 | (SEQ ID NO: 253) | MAPKKKRKVSRQEIKRINKIRRRLVKDSNTKKAGKTGPMKTLLVRVM |
| | | TPDLRERLENLRKKPENIPQPISNTSRANLNKLLTDYTEMKKAILHV |
| | | YWEEFQKDPVGLMSRVAQPASKKIDQNKLKPEMDEKGNLTTAGFACS |
| | | QCGQPLFVYKLEQVSEKGKAYTNYFGRCNVAEHEKLILLAQLKPEKD |
| | | SDEAVTYSLGKFGQRALDFYSIHVTKESTHPVKPLAQIAGNRYASGP |
| | | VGKALSDACMGTIASFLSKYQDIIIEHQKVVKGNQKRLESLRELAGK |
| | | ENLEYPSVTLPPQPHTKEGVDAYNEVIARVRMWVNLNLWQKLKLSRD |
| | | DAKPLLRLKGFPSFPLVERQANEVDWWDMVCNVKKLINEKKEDGKVF |
| | | WQNLAGYKRQEALRPYLSSEEDRKKGKKFARYQLGDLLKHLEKKHGE |
| | | DWGKVYDEAWERIDKKVEGLSKHIKLEEERRSEDAQSKAALTDWLRA |
| | | KASFVIEGLKEADKDEFCRCELKLQKWYGDLRGKPFAIEAENSILDI |
| | | SGFSKQYNCAFIWQKDGVKKLNLYLIINYFKGGKLRFKKIKPEAFEA |
| | | NRFYTVINKKSGEIVPMEVNFNFDDPNLIILPLAFGKRQGREFIWND |
| | | LLSLETGSLKLANGRVIEKTLYNRRTRQDEPALFVALTFERREVLDS |
| | | SNIKPMNLIGVDRGENIPAVIALTDPEGCPLSRFKDSLGNPTHILRI |
| | | GESYKEKQRTIQAKKEVEQRRAGGYSRKYASKAKNLADDMVRNTARD |
| | | LLYYAVTQDAMLIFENLSRGFGRQGKRTFMAERQYTRMEDWLTAKLA |
| | | YEGLSKTYLSKTLAQYTSKTCSNCGFTITSADYDRVLEKLKKTATGW |
| | | MTTINGKELKVEGQITYYNRRKRQNVVKDLSVELDRLSEESVNNDIS |
| | | SWTKGRSGEALSLLKKRFSHRPVQEKFVCLNCGFETHADEQAALNIA |
| | | RSWLFLRSQEYKKYQTNKTTGNTDKRAFVETWQSFYRKKLKEVWKPA |
| | | VTSPKKKRKV (SEQ ID NO: 254) |
| CasX 491 | (SEQ ID NO: 255) | MAPKKKRKVSRQEIKRINKIRRRLVKDSNTKKAGKTGPMKTLLVRVM |
| | | TPDLRERLENLRKKPENIPQPISNTSRANLNKLLTDYTEMKKAILHV |
| | | YWEEFQKDPVGLMSRVAQPASKKIDQNKLKPEMDEKGNLTTAGFACS |
| | | QCGQPLFVYKLEQVSEKGKAYTNYFGRCNVAEHEKLILLAQLKPEKD |
| | | SDEAVTYSLGKFGQRALDFYSIHVTKESTHPVKPLAQIAGNRYASGP |
| | | VGKALSDACMGTIASFLSKYQDIIIEHQKVVKGNQKRLESLRELAGK |
| | | ENLEYPSVTLPPQPHTKEGVDAYNEVIARVRMWVNLNLWQKLKLSRD |
| | | DAKPLLRLKGFPSFPLVERQANEVDWWDMVCNVKKLINEKKEDGKVF |
| | | WQNLAGYKRQEALRPYLSSEEDRKKGKKFARYQLGDLLLHLEKKHGE |
| | | DWGKVYDEAWERIDKKVEGLSKHIKLEEERRSEDAQSKAALTDWLRA |
| | | KASFVIEGLKEADKDEFCRCELKLQKWYGDLRGKPFAIEAENSILDI |
| | | SGFSKQYNCAFIWQKDGVKKLNLYLIINYFKGGKLRFKKIKPEAFEA |
| | | NRFYTVINKKSGEIVPMEVNFNFDDPNLIILPLAFGKRQGREFIWND |
| | | LLSLETGSLKLANGRVIEKTLYNRRTRQDEPALFVALTFERREVLDS |
| | | SNIKPMNLIGVDRGENIPAVIALTDPEGCPLSRFKDSLGNPTHILRI |
| | | GESYKEKQRTIQAKKEVEQRRAGGYSRKYASKAKNLADDMVRNTARD |
| | | LLYYAVTQDAMLIFENLSRGFGRQGKRTFMAERQYTRMEDWLTAKLA |
| | | YEGLSKTYLSKTLAQYTSKTCSNCGFTITSADYDRVLEKLKKTATGW |
| | | MTTINGKELKVEGQITYYNRYKRQNVVKDLSVELDRLSEESVNNDIS |
| | | SWTKGRSGEALSLLKKRFSHRPVQEKFVCLNCGFETHADEQAALNIA |
| | | RSWLFLRSQEYKKYQTNKTTGNTDKRAFVETWQSFYRKKLKEVWKPA |
| | | VTSPKKKRKV (SEQ ID NO: 256) |
| CasX 494 | (SEQ ID NO: 257) | MAPKKKRKVSRQEIKRINKIRRRLVKDSNTKKAGKTGPMKTLLVRVM |
| | | TPDLRERLENLRKKPENIPQPISNTSRANLNKLLTDYTEMKKAILHV |
| | | YWEEFQKDPVGLMSRVAQPASKKIDQNKLKPEMDEKGNLTTAGFACS |
| | | QCGQPLFVYKLEQVSEKGKAYTNYFGRCNVAEHEKLILLAQLKPEKD |
| | | SDEAVTYSLGKFGQRALDFYSIHVTRESNHPVKPLEQIGGNSCASGP |
| | | VGKALSDACMGAVASFLTKYQDIILEHQKVIKKNEKRLANLKDIASA |
| | | NGLAFPKITLPPQPHTKEGIEAYNNVVAQIVIWVNLNLWQKLKIGRD |
| | | EAKPLQRLKGFPSFPLVERQANEVDWWDMVCNVKKLINEKKEDGKVF |
| | | WQNLAGYKRQEALRPYLSSEEDRKKGKKFARYQLGDLLLHLEKKHGE |
| | | DWGKVYDEAWERIDKKVEGLSKHIKLEEERRSEDAQSKAALTDWLRA |
| | | KASFVIEGLKEADKDEFCRCELKLQKWYGDLRGKPFAIEAENSILDI |
| | | SGFSKQYNCAFIWQKDGVKKLNLYLIINYFKGGKLRFKKIKPEAFEA |
| | | NRFYTVINKKSGEIVPMEVNFNFDDPNLIILPLAFGKRQGREFIWND |
| | | LLSLETGSLKLANGRVIEKTLYNRRTRQDEPALFVALTFERREVLDS |
| | | SNIKPMNLIGVDRGENIPAVIALTDPEGCPLSRFKDSLGNPTHILRI |
| | | GESYKEKQRTIQAKKEVEQRRAGGYSRKYASKAKNLADDMVRNTARD |
| | | LLYYAVTQDAMLIFENLSRGFGRQGKRTFMAERQYTRMEDWLTAKLA |
| | | YEGLSKTYLSKTLAQYTSKTCSNCGFTITSADYDRVLEKLKKTATGW |
| | | MTTINGKELKVEGQITYYNRYKRQNVVKDLSVELDRLSEESVNNDIS |
| | | SWTKGRSGEALSLLKKRFSHRPVQEKFVCLNCGFETHADEQAALNIA |
| | | RSWLFLRSQEYKKYQTNKTTGNTDKRAFVETWQSFYRKKLKEVWKPA |
| | | VTSPKKKRKV (SEQ ID NO: 258) |

### Example 6: Generation of RNA Guides

[0884] For the generation of RNA single guides and spacers, templates for in vitro transcription were generated by performing PCR with Q5 polymerase (NEB M0491) according to the recommended protocol, with template oligos for each backbone and amplification primers with the T7 promoter and the spacer sequence. The DNA primer sequences for the T7 promoter, guide and spacer for guides and spacers are presented in Table 11, below. The template oligos, labeled “backbone fwd” and “backbone rev” for each scaffold, were included at a final concentration of 20 nM each, and the amplification primers (T7 promoter and the unique spacer primer) were included at a final concentration of 1 uM each. The sg2, sg32, sg64, and sg174 guides correspond to SEQ ID NOS: 5, 2104, 2106, and 2238, respectively, with the exception that sg2, sg32, and sg64 were modified with an additional 5′ G to increase transcription efficiency (compare sequences in Table 11 to Table 2). The 7.37 spacer targets beta2-microglobulin (B2M). Following PCR amplification, templates were cleaned and isolated by phenol-chloroform-isoamyl alcohol extraction followed by ethanol precipitation.

[0885] In vitro transcriptions were carried out in buffer containing 50 mM Tris pH 8.0, 30 mM MgCl₂, 0.01% Triton X-100, 2 mM spermidine, 20 mM DTT, 5 mM NTPs, 0.5 μM template, and 100 μg/mL T7 RNA polymerase. Reactions were incubated at 37° C. overnight. 20 units of DNase I (Promega #M6101)) were added per 1 mL of transcription volume and incubated for one hour. RNA products were purified via denaturing PAGE, ethanol precipitated, and resuspended in 1×phosphate buffered saline. To fold the sgRNAs, samples were heated to 700 C for 5 min and then cooled to room temperature. The reactions were supplemented to 1 mM final MgCl₂ concentration, heated to 50° C. for 5 min and then cooled to room temperature. Final RNA guide products were stored at −80° C.

TABLE 11
Sequences for generation of guide RNA

| Primer | Primer sequence | RNA product |
|---|---|---|
| T7 promoter | GAAATTAATACGACTCACTATA | Used for all |
| primer | (SEQ ID NO: 259) | |
| sg2 backbone | GAAATTAATACGACTCACTATAGGTACTGGCGCTTT | GGUACUGGCGCUUUUAUCUCAUUACUUUGA |
| fwd | TATCTCATTACTTTGAGAGCCATCACCAGCGACTAT | GAGCCAUCACCAGCGACUAUGUCGUAUGGG |
| | GTCGTATGGGTAAAG (SEQ ID NO: 260) | UAAAGCGCUUAUUUAUCGGAGAGAAAUCCG |
| sg2 backbone | CTTTGATGCTTCTTATTTATCGGATTTCTCTCCGAT | AUAAAUAAGAAGCAUCAAAGGGCCGAGAUG |
| rev | AAATAAGCGCTTTACCCATACGACATAGTCGCTGGT | UCUCGCUCCG (SEQ ID NO: 272) |
| | GATGGC (SEQ ID NO: 261) | |
| sg2.7.37 | CGGAGCGAGACATCTCGGCCCTTTGATGCTTCTTAT | |
| spacer primer | TTATCGGATTTCTCTCCG (SEQ ID NO: 262) | |
| sg32 | GAAATTAATACGACTCACTATAGGTACTGGCGCTTT | GGUACUGGCGCUUUUAUCUCAUUACUUUGA |
| backbone fwd | TATCTCATTACTTTGAGAGCCATCACCAGCGACTAT | GAGCCAUCACCAGCGACUAUGUCGUAUGGG |
| | GTCGTATGGGTAAAGCGC (SEQ ID NO: 263) | UAAAGCGCCCUCUUCGGAGGGAAGCAUCAA |
| sg32 | CTTTGATGCTTCCCTCCGAAGAGGGCGCTTTACCCA | AGGGCCGAGAUGUCUCG |
| backbone rev | TACGACATAG (SEQ ID NO: 264) | (SEQ ID NO: 273) |
| sg32.7.37 | CGGAGCGAGACATCTCGGCCCTTTGATGCTTCCCTC | |
| spacer primer | CGAAGAG (SEQ ID NO: 265) | |
| sg64 | GAAATTAATACGACTCACTATAGGTACTGGCGCCTT | GGUACUGGCGCCUUUAUCUCAUUACUUUGA |
| backbone fwd | TATCTCATTACTTTGAGAGCCATCACCAGCGACTAT | GAGCCAUCACCAGCGACUAUGUCGUAUGGG |
| | GTCGTATGGGTAAAGCGC (SEQ ID NO: 266) | UAAAGCGCUUACGGACUUCGGUCCGUAAGA |
| sg64 | CTTTGATGCTTCTTACGGACCGAAGTCCGTAAGCGC | AGCAUCAAAGGGCCGAGAUGUCUCGCUCCG |
| backbone rev | TTTACCCATACGACATAG (SEQ ID NO: 267) | (SEQ ID NO: 274) |
| sg64.7.37 | CGGAGCGAGACATCTCGGCCCTTTGATGCTTCTTAC | |
| spacer primer | GGACCGAAG (SEQ ID NO: 268) | |
| sg174 | GAAATTAATACGACTCACTATAACTGGCGCTTTTAT | ACUGGCGCUUUUAUCUgAUUACUUUGAGAG |
| backbone fwd | CTGATTACTTTGAGAGCCATCACCAGCGACTATGTC | CCAUCACCAGCGACUAUGUCGUAgUGGGUA |
| | GTAGTGGGTAAAGCT (SEQ ID NO: 269) | AAGCUCCCUCUUCGGAGGGAGCAUCAAAGG |
| sg174 | CTTTGATGCTCCCTCCGAAGAGGGAGCTTTACCCAC | GCCGAGAUGUCUCGCUCCG |
| backbone rev | TACGACATAGTCGC (SEQ ID NO: 270) | (SEQ ID NO: 275) |
| sg174.7.37 | CGGAGCGAGACATCTCGGCCCTTTGATGCTCCCTCC | |
| spacer primer | (SEQ ID NO: 271) | |

### Example 7: RNP Assembly

[0886] Purified wild-type and RNP of CasX and single guide RNA (sgRNA) were either prepared immediately before experiments or prepared and snap-frozen in liquid nitrogen and stored at −80° C. for later use. To prepare the RNP complexes, the CasX protein was incubated with sgRNA at 1:1.2 molar ratio. Briefly, sgRNA was added to Buffer #1 (25 mM NaPi, 150 mM NaCl, 200 mM trehalose, 1 mM MgCl2), then the CasX was added to the sgRNA solution, slowly with swirling, and incubated at 37° C. for 10 min to form RNP complexes. RNP complexes were filtered before use through a 0.22 m Costar 8160 filters that were pre-wet with 200 μl Buffer #1. If needed, the RNP sample was concentrated with a 0.5 ml Ultra 100-Kd cutoff filter, (Millipore part #UFC510096), until the desired volume was obtained. Formation of competent RNP was assessed as described in Example 14.

### Example 8: Assessing Binding Affinity to the Guide RNA

[0887] Purified wild-type and improved CasX will be incubated with synthetic single-guide RNA containing a 3′ Cy7.5 moiety in low-salt buffer containing magnesium chloride as well as heparin to prevent non-specific binding and aggregation. The sgRNA will be maintained at a concentration of 10 pM, while the protein will be titrated from 1 pM to 100 μM in separate binding reactions. After allowing the reaction to come to equilibrium, the samples will be run through a vacuum manifold filter-binding assay with a nitrocellulose membrane and a positively charged nylon membrane, which bind protein and nucleic acid, respectively. The membranes will be imaged to identify guide RNA, and the fraction of bound vs unbound RNA will be determined by the amount of fluorescence on the nitrocellulose vs nylon membrane for each protein concentration to calculate the dissociation constant of the protein-sgRNA complex. The experiment will also be carried out with improved variants of the sgRNA to determine if these mutations also affect the affinity of the guide for the wild-type and mutant proteins. We will also perform electromobility shift assays to qualitatively compare to the filter-binding assay and confirm that soluble binding, rather than aggregation, is the primary contributor to protein-RNA association.

### Example 9: Assessing Binding Affinity to the Target DNA

[0888] Purified wild-type and improved CasX will be complexed with single-guide RNA bearing a targeting sequence complementary to the target nucleic acid. The RNP complex will be incubated with double-stranded target DNA containing a PAM and the appropriate target nucleic acid sequence with a 5′ Cy7.5 label on the target strand in low-salt buffer containing magnesium chloride as well as heparin to prevent non-specific binding and aggregation. The target DNA will be maintained at a concentration of 1 nM, while the RNP will be titrated from 1 pM to 100 μM in separate binding reactions. After allowing the reaction to come to equilibrium, the samples will be run on a native 5% polyacrylamide gel to separate bound and unbound target DNA. The gel will be imaged to identify mobility shifts of the target DNA, and the fraction of bound vs unbound DNA will be calculated for each protein concentration to determine the dissociation constant of the RNP-target DNA ternary complex.

### Example 10: Editing of Gene Targets PCSK9, PMP22, TRAC, SOD1, B2M and HTT

[0889] The purpose of this study was to evaluate the ability of the CasX variant 119 and gNA variant 174 to edit nucleic acid sequences in six gene targets.

### Materials and Methods

[0890] Spacers for all targets except B2M and SOD1 were designed in an unbiased manner based on PAM requirements (TTC or CTC) to target a desired locus of interest. Spacers targeting B2M and SOD1 had been previously identified within targeted exons via lentiviral spacer screens carried out for these genes. Designed spacers for the other targets were ordered from Integrated DNA Technologies (IDT) as single-stranded DNA (ssDNA) oligo pairs. ssDNA spacer pairs were annealed together and cloned via Golden Gate cloning into a base mammalian-expression plasmid construct that contains the following components: codon optimized Cas X 119 protein+NLS under an EF1A promoter, guide scaffold 174 under a U6 promoter, carbenicillin and puromycin resistance genes. Assembled products were transformed into chemically-competent E. coli, plated on Lb-Agar plates (LB: Teknova Cat #L9315, Agar: Quartzy Cat #214510) containing carbenicillin and incubated at 37° C. Individual colonies were picked and miniprepped using Qiagen Qiaprep® spin Miniprep Kit (Qiagen Cat #27104) following the manufacturer's protocol. The resulting plasmids were sequenced through the guide scaffold region via Sanger sequencing (Quintara Biosciences) to ensure correct ligation.

[0891] HEK 293T cells were grown in Dulbecco's Modified Eagle Medium (DMEM; Corning Cellgro, #10-013-CV) supplemented with 10% fetal bovine serum (FBS; Seradigm, #1500-500), 100 Units/ml penicillin and 100 mg/ml streptomycin (100×-Pen-Strep; GIBCO #15140-122), sodium pyruvate (100×, Thermofisher #11360070), non-essential amino acids (100× Thermofisher #11140050), HEPES buffer (100× Thermofisher #15630080), and 2-mercaptoethanol (1000× Thermofisher #21985023). Cells were passed every 3-5 days using TryplE and maintained in an incubator at 37° C. and 5% CO2.

[0892] On day 0, HEK293T cells were seeded in 96-well, flat-bottom plates at 30k cells/well. On day 1, cells were transfected with 100 ng plasmid DNA using Lipofectamine™ 3000 according to the manufacturer's protocol. On day 2, cells were switched to FB medium containing puromycin. On day 3, this media was replaced with fresh FB medium containing puromycin. The protocol after this point diverged depending on the gene of interest. Day 4 for PCSK9, PMP22, and TRAC: cells were verified to have completed selection and switched to FB medium without puromycin. Day 4 for B2M, SOD1, and HTT: cells were verified to have completed selection and passed 1:3 using TryplE into new plates containing FB medium without puromycin. Day 7 for PCSK9, PMP22, and TRAC: cells were lifted from the plate, washed in dPBS, counted, and resuspended in Quick Extract (Lucigen, QE09050) at 10,000 cells/μl. Genomic DNA was extracted according to the manufacturer's protocol and stored at −20° C. Day 7 for B2M, SOD1, and HTT: cells were lifted from the plate, washed in dPBS, and genomic DNA was extracted with the Quick-DNA Miniprep Plus Kit (Zymo, D4068) according to the manufacturer's protocol and stored at −20° C.

[0893] NGS Analysis: Editing in cells from each experimental sample was assayed using next generation sequencing (NGS) analysis. All PCRs were carried out using the KAPA HiFi HotStart ReadyMix PCR Kit (KR0370). The template for genomic DNA sample PCR was 5 μl of genomic DNA in QE at 10k cells/μL for PCSK9, PMP22, and TRAC. The template for genomic DNA sample PCR was 400 ng of genomic DNA in water for B2M, SOD1, and HTT. Primers were designed specific to the target genomic location of interest to form a target amplicon. These primers contain additional sequence at the 5′ ends to introduce Illumina read and 2 sequences. Further, they contain a 7 nt randomer sequence that functions as a unique molecular identifier (UMI). Quality and quantification of the amplicon was assessed using a Fragment Analyzer DNA analyzer kit (Agilent, dsDNA 35-1500 bp). Amplicons were sequenced on the Illumina Miseq™ according to the manufacturer's instructions. Resultant sequencing reads were aligned to a reference sequence and analyzed for indels. Samples with editing that did not align to the estimated cut location or with unexpected alleles in the spacer region were discarded.

### Results

[0894] In order to validate the editing effected by the CasX:gNA 119.174 at a variety of genetic loci, a clonal plasmid transfection experiment was performed in HEK 293T cells. Multiple spacers (Table 12) were designed and cloned into an expression plasmid encoding the CasX 119 nuclease and guide 174 scaffold. HEK 293T cells were transfected with plasmid DNA, selected with puromycin, and harvested for genomic DNA six days post-transfection. Genomic DNA was analyzed via next generation sequencing (NGS) and aligned to a reference DNA sequence for analysis of insertions or deletions (indels). CasX:gNA 119.174 was able to efficiently generate indels across the 6 target genes, as shown in FIGS. 9 and 10. Indel rates varied between spacers, but median editing rates were consistently at 60% or higher, and in some cases, indel rates as high as 91% were observed. Additionally, spacers with non-canonical CTC PAMs were demonstrated to be able to generate indels with all tested target genes (FIG. 11).

[0895] The results demonstrate that the CasX variant 119 and gNA variant 174 can consistently and efficiently generate indels at a wide variety of genetic loci in human cells. The unbiased selection of many of the spacers used in the assays shows the overall effectiveness of the 119.174 RNP molecules to edit genetic loci, while the ability to target to spacers with both a TTC and a CTC PAM demonstrates its increased versatility compared to reference CasX that edit only with the TTC PAM. Table 12 also lists the RNA sequences of the actual spacers; plasmids were created with the corresponding DNA sequences with thymine bases rather than uracil.

TABLE 12
Spacer sequences targeting each genetic locus.

| | | | | Spacer Sequence |
|---|---|---|---|---|
| Gene | Spacer | PAM | Spacer Sequence | (RNA) |
| PCSK9 | 6.1 | TTC | GAGGAGGACGGCCTGG | GAGGAGGACGGCCUGG |
| | | | CCGA | CCGA |
| | | | (SEQ ID NO: 276) | (SEQ ID NO: 320) |
| PCSK9 | 6.2 | TTC | ACCGCTGCGCCAAGGT | ACCGCUGCGCCAAGGU |
| | | | GCGG | GCGG |
| | | | (SEQ ID NO: 277) | (SEQ ID NO: 321) |
| PCSK9 | 6.4 | TTC | GCCAGGCCGTCCTCCT | GCCAGGCCGUCCUCCU |
| | | | CGGA | CGGA |
| | | | (SEQ ID NO: 278) | (SEQ ID NO: 322) |
| PCSK9 | 6.5 | TTC | GTGCTCGGGTGCTTCG | GUGCUCGGGUGCUUCG |
| | | | GCCA | GCCA |
| | | | (SEQ ID NO: 279) | (SEQ ID NO: 323) |
| PCSK9 | 6.3 | TTC | ATGGCCTTCTTCCTGG | AUGGCCUUCUUCCUGG |
| | | | CTTC | CUUC |
| | | | (SEQ ID NO: 280) | (SEQ ID NO: 324) |
| PCSK9 | 6.6 | TTC | GCACCACCACGTAGGT | GCACCACCACGUAGGU |
| | | | GCCA | GCCA |
| | | | (SEQ ID NO: 281) | (SEQ ID NO: 325) |
| PCSK9 | 6.7 | TTC | TCCTGGCTTCCTGGTG | UCCUGGCUUCCUGGUG |
| | | | AAGA | AAGA |
| | | | (SEQ ID NO: 282) | (SEQ ID NO: 326) |
| PCSK9 | 6.8 | TTC | TGGCTTCCTGGTGAAG | UGGCUUCCUGGUGAAG |
| | | | ATGA | AUGA |
| | | | (SEQ ID NO: 283) | (SEQ ID NO: 327) |
| PCSK9 | 6.9 | TTC | CCAGGAAGCCAGGAAG | CCAGGAAGCCAGGAAG |
| | | | AAGG | AAGG |
| | | | (SEQ ID NO: 284) | (SEQ ID NO: 328) |
| PCSK9 | 6.10 | TTC | TCCTTGCATGGGGCCA | UCCUUGCAUGGGGCCA |
| | | | GGAT | GGAU |
| | | | (SEQ ID NO: 285) | (SEQ ID NO: 329) |
| PMP22 | 18.16 | TTC | GGCGGCAAGTTCTGCT | GGCGGCAAGUUCUGCU |
| | | | CAGC | CAGC |
| | | | (SEQ ID NO: 286) | (SEQ ID NO: 330) |
| PMP22 | 18.17 | TTC | TCTCCACGATCGTCAG | UCUCCACGAUCGUCAG |
| | | | CGTG | CGUG |
| | | | (SEQ ID NO: 287) | (SEQ ID NO: 331) |
| PMP22 | 18.18 | CTC | ACGATCGTCAGCGTGA | ACGAUCGUCAGCGUGA |
| | | | GTGC | GUGC |
| | | | (SEQ ID NO: 288) | (SEQ ID NO: 332) |
| PMP22 | 18.1 | TTC | CTCTAGCAATGGATCG | CUCUAGCAAUGGAUCG |
| | | | TGGG | UGGG |
| | | | (SEQ ID NO: 289) | (SEQ ID NO: 333) |
| TRAC | 15.3 | TTC | CAAACAAATGTGTCAC | CAAACAAAUGUGUCAC |
| | | | AAAG | AAAG |
| | | | (SEQ ID NO: 290) | (SEQ ID NO: 334) |
| TRAC | 15.4 | TTC | GATGTGTATATCACAG | GAUGUGUAUAUCACAG |
| | | | ACAA | ACAA |
| | | | (SEQ ID NO: 291) | (SEQ ID NO: 335) |
| TRAC | 15.5 | TTC | GGAATAATGCTGTTGT | GGAAUAAUGCUGUUGU |
| | | | TGAA | UGAA |
| | | | (SEQ ID NO: 292) | (SEQ ID NO: 336) |
| TRAC | 15.9 | TTC | AAATCCAGTGACAAGT | AAAUCCAGUGACAAGU |
| | | | CTGT | CUGU |
| | | | (SEQ ID NO: 293) | (SEQ ID NO: 337) |
| TRAC | 15.10 | TTC | AGGCCACAGCACTGTT | AGGCCACAGCACUGUU |
| | | | GCTC | GCUC |
| | | | (SEQ ID NO: 294) | (SEQ ID NO: 338) |
| TRAC | 15.21 | TTC | AGAAGACACCTTCTTC | AGAAGACACCUUCUUC |
| | | | CCCA | CCCA |
| | | | (SEQ ID NO: 295) | (SEQ ID NO: 339) |
| TRAC | 15.22 | TTC | TCCCCAGCCCAGGTAA | UCCCCAGCCCAGGUAA |
| | | | GGGC | GGGC |
| | | | (SEQ ID NO: 296) | (SEQ ID NO: 340) |
| TRAC | 15.23 | TTC | CCAGCCCAGGTAAGGG | CCAGCCCAGGUAAGGG |
| | | | CAGC | CAGC |
| | | | (SEQ ID NO: 297) | (SEQ ID NO: 341) |
| HTT | 5.1 | TTC | AGTCCCTCAAGTCCTT | AGUCCCUCAAGUCCUU |
| | | | CCAG | CCAG |
| | | | (SEQ ID NO: 298) | (SEQ ID NO: 342) |
| HTT | 5.2 | TTC | AGCAGCAGCAGCAGCA | AGCAGCAGCAGCAGCA |
| | | | GCAG | GCAG |
| | | | (SEQ ID NO: 299) | (SEQ ID NO: 343) |
| HTT | 5.3 | TTC | TCAGCCGCCGCCGCAG | UCAGCCGCCGCCGCAG |
| | | | GCAC | GCAC |
| | | | (SEQ ID NO: 300) | (SEQ ID NO: 344) |
| HTT | 5.4 | TTC | AGGGTCGCCATGGCGG | AGGGUCGCCAUGGCGG |
| | | | TCTC | UCUC |
| | | | (SEQ ID NO: 301) | (SEQ ID NO: 345) |
| HTT | 5.5 | TTC | TCAGCTTTTCCAGGGT | UCAGCUUUUCCAGGGU |
| | | | CGCC | CGCC |
| | | | (SEQ ID NO: 302) | (SEQ ID NO: 346) |
| HTT | 5.7 | CTC | GCCGCAGCCGCCCCCG | GCCGCAGCCGCCCCCG |
| | | | CCGC | CCGC |
| | | | (SEQ ID NO: 303) | (SEQ ID NO: 347) |
| HTT | 5.8 | CTC | GCCACAGCCGGGCCGG | GCCACAGCCGGGCCGG |
| | | | GTGG | GUGG |
| | | | (SEQ ID NO: 304) | (SEQ ID NO: 348) |
| HTT | 5.9 | CTC | TCAGCCACAGCCGGGC | UCAGCCACAGCCGGGC |
| | | | CGGG | CGGG |
| | | | (SEQ ID NO: 305) | (SEQ ID NO: 349) |
| HTT | 5.10 | CTC | CGGTCGGTGCAGCGGC | CGGUCGGUGCAGCGGC |
| | | | TCCT | UCCU |
| | | | (SEQ ID NO: 306) | (SEQ ID NO: 350) |
| SOD1 | 8.56 | TTC | CCACACCTTCACTGGT | CCACACCUUCACUGGU |
| | | | CCAT | CCAU |
| | | | (SEQ ID NO: 307) | (SEQ ID NO: 351) |
| SOD1 | 8.57 | TTC | TAAAGGAAAGTAATGG | UAAAGGAAAGUAAUGG |
| | | | ACCA | ACCA |
| | | | (SEQ ID NO: 308) | (SEQ ID NO: 352) |
| SOD1 | 8.58 | TTC | CTGGTCCATTACTTTC | CUGGUCCAUUACUUUC |
| | | | CTTT | CUUU |
| | | | (SEQ ID NO: 309) | (SEQ ID NO: 353) |
| SOD1 | 8.2 | TTC | ATGTTCATGAGTTTGG | AUGUUCAUGAGUUUGG |
| | | | AGAT | AGAU |
| | | | (SEQ ID NO: 310) | (SEQ ID NO: 354) |
| SOD1 | 8.68 | TTC | TGAGTTTGGAGATAAT | UGAGUUUGGAGAUAAU |
| | | | ACAG | ACAG |
| | | | (SEQ ID NO: 311) | (SEQ ID NO: 355) |
| SOD1 | 8.59 | TTC | ATAGACACATCGGCCA | AUAGACACAUCGGCCA |
| | | | CACC | CACC |
| | | | (SEQ ID NO: 312) | (SEQ ID NO: 356) |
| SOD1 | 8.47 | TTC | TTATTAGGCATGTTGG | UUAUUAGGCAUGUUGG |
| | | | AGAC | AGAC |
| | | | (SEQ ID NO: 313) | (SEQ ID NO: 357) |
| SOD1 | 8.62 | CTC | CAGGAGACCATTGCAT | CAGGAGACCAUUGCAU |
| | | | CATT | CAUU |
| | | | (SEQ ID NO: 314) | (SEQ ID NO: 358) |
| B2M | 7.120 | TTC | GGCCTGGAGGCTATCC | GGCCUGGAGGCUAUCC |
| | | | AGCG | AGCG |
| | | | (SEQ ID NO: 315) | (SEQ ID NO: 359) |
| B2M | 7.37 | TTC | GGCCGAGATGTCTCGC | GGCCGAGAUGUCUCGC |
| | | | TCCG | UCCG |
| | | | (SEQ ID NO: 316) | (SEQ ID NO: 360) |
| B2M | 7.43 | CTC | AGGCCAGAAAGAGAGA | AGGCCAGAAAGAGAGA |
| | | | GTAG | GUAG |
| | | | (SEQ ID NO: 317) | (SEQ ID NO: 361) |
| B2M | 7.119 | CTC | CGCTGGATAGCCTCCA | CGCUGGAUAGCCUCCA |
| | | | GGCC | GGCC |
| | | | (SEQ ID NO: 318) | (SEQ ID NO: 362) |

### Example 11: Assessing Differential PAM Recognition In Vitro

[0896] Purified wild-type and engineered CasX variants will be complexed with single-guide RNA bearing a fixed targeting sequence. The RNP complexes will be added to buffer containing MgCl2 at a final concentration of 100 nM and incubated with 5′ Cy7.5-labeled double-stranded target DNA at a concentration of 10 nM. Separate reactions will be carried out with different DNA substrates containing different PAMs adjacent to the target nucleic acid sequence. Aliquots of the reactions will be taken at fixed time points and quenched by the addition of an equal volume of 50 mM EDTA and 95% formamide. The samples will be run on a denaturing polyacrylamide gel to separate cleaved and uncleaved DNA substrates. The results will be visualized and the rate of cleavage of the non-canonical PAMs by the CasX variants will be determined.

### Example 12: Assessing Nuclease Activity for Double-Strand Cleavage

[0897] Purified wild-type and engineered CasX variants will be complexed with single-guide RNA bearing a fixed PM22 targeting sequence. The RNP complexes will be added to buffer containing MgCl2 at a final concentration of 100 nM and incubated with double-stranded target DNA with a 5′ Cy7.5 label on either the target or non-target strand at a concentration of 10 nM. Aliquots of the reactions will be taken at fixed time points and quenched by the addition of an equal volume of 50 mM EDTA and 95% formamide. The samples will be run on a denaturing polyacrylamide gel to separate cleaved and uncleaved DNA substrates. The results will be visualized and the cleavage rates of the target and non-target strands by the wild-type and engineered variants will be determined. To more clearly differentiate between changes to target binding vs the rate of catalysis of the nucleolytic reaction itself, the protein concentration will be titrated over a range from 10 nM to 1 uM and cleavage rates will be determined at each concentration to generate a pseudo-Michaelis-Menten fit and determine the kcat* and KM*. Changes to KM* are indicative of altered binding, while changes to kcat* are indicative of altered catalysis.

### Example 13: Assessing Target Strand Loading for Cleavage

[0898] Purified wild-type and engineered CasX 119 will be complexed with single-guide RNA bearing a fixed PM22 targeting sequence. The RNP complexes will be added to buffer containing MgCl2 at a final concentration of 100 nM and incubated with double-stranded target DNA with a 5′ Cy7.5 label on the target strand and a 5′ Cy5 label on the non-target strand at a concentration of 10 nM. Aliquots of the reactions will be taken at fixed time points and quenched by the addition of an equal volume of 50 mM EDTA and 95% formamide. The samples will be run on a denaturing polyacrylamide gel to separate cleaved and uncleaved DNA substrates. The results will be visualized and the cleavage rates of both strands by the variants will be determined. Changes to the rate of target strand cleavage but not non-target strand cleavage would be indicative of improvements to the loading of the target strand in the active site for cleavage. This activity could be further isolated by repeating the assay with a dsDNA substrate that has a gap on the non-target strand, mimicking a pre-cleaved substrate. Improved cleavage of the non-target strand in this context would give further evidence that the loading and cleavage of the target strand, rather

### Example 14: CasX:gNA In Vitro Cleavage Assays

[0899] 1. Determining cleavage-competent fractions for protein variants compared to wild-type reference CasX

[0900] The ability of CasX variants to form active RNP compared to reference CasX was determined using an in vitro cleavage assay. The beta-2 microglobulin (B2M) 7.37 target for the cleavage assay was created as follows. DNA oligos with the sequence TGAAGCTGACAGCATTCGGGCCGAGATGTCTCGCTCCGTGGCCTTAGCTGTGCTCGCGC T (SEQ ID NO: 364; non-target strand, NTS) and TGAAGCTGACAGCATTCGGGCCGAGATGTCTCGCTCCGTGGCCTTAGCTGTGCTCGCGC T (SEQ ID NO: 365; target strand, TS) were purchased with 5′ fluorescent labels (LI-COR IRDye 700 and 800, respectively). dsDNA targets were formed by mixing the oligos in a 1:1 ratio in 1× cleavage buffer (20 mM Tris HCl pH 7.5, 150 mM NaCl, 1 mM TCEP, 5% glycerol, 10 mM MgCl₂), heating to 950 C for 10 minutes, and allowing the solution to cool to room temperature.

[0901] CasX RNPs were reconstituted with the indicated CasX and guides (see FIGS. 12 and 13) at a final concentration of 1 μM with 1.5-fold excess of the indicated guide unless otherwise specified in 1× cleavage buffer (20 mM Tris HCl pH 7.5, 150 mM NaCl, 1 mM TCEP, 5% glycerol, 10 mM MgCl₂) at 370 C for 10 min before being moved to ice until ready to use. The 7.37 target was used, along with sgRNAs having spacers complementary to the 7.37 target.

[0902] Cleavage reactions were prepared with final RNP concentrations of 100 nM and a final target concentration of 100 nM. Reactions were carried out at 37° C. and initiated by the addition of the 7.37 target DNA. Aliquots were taken at 5, 10, 30, 60, and 120 minutes and quenched by adding to 95% formamide, 20 mM EDTA. Samples were denatured by heating at 950 C for 10 minutes and run on a 10% urea-PAGE gel. The gels were either imaged with a LI-COR Odyssey CLx and quantified using the LI-COR Image Studio software or imaged with a Cytiva Typhoon and quantified using the Cytiva IQTL software. The resulting data were plotted and analyzed using Prism. We assumed that CasX acts essentially as a single-turnover enzyme under the assayed conditions, as indicated by the observation that sub-stoichiometric amounts of enzyme fail to cleave a greater-than-stoichiometric amount of target even under extended time-scales and instead approach a plateau that scales with the amount of enzyme present. Thus, the fraction of target cleaved over long time-scales by an equimolar amount of RNP is indicative of what fraction of the RNP is properly formed and active for cleavage. The cleavage traces were fit with a biphasic rate model, as the cleavage reaction clearly deviates from monophasic under this concentration regime, and the plateau was determined for each of three independent replicates. The mean and standard deviation were calculated to determine the active fraction (Table 13). The results are shown in FIG. 12.

[0903] Apparent active (competent) fractions were determined for RNPs formed for CasX2+guide 174+7.37 spacer, CasX119+guide 174+7.37 spacer, CasX457+guide 174+7.37 spacer, CasX488+guide 174+7.37 spacer, and CasX491+guide 174+7.37 spacer. The determined active fractions are shown in Table 13. All CasX variants had higher active fractions than the wild-type CasX2, indicating that the engineered CasX variants form significantly more active and stable RNP with the identical guide under tested conditions compared to wild-type CasX. This may be due to an increased affinity for the sgRNA, increased stability or solubility in the presence of sgRNA, or greater stability of a cleavage-competent conformation of the engineered CasX:sgRNA complex. An increase in solubility of the RNP was indicated by a notable decrease in the observed precipitate formed when CasX457, CasX488, or CasX491 was added to the sgRNA compared to CasX2.

2. In vitro Cleavage Assays—Determining k_{cleave} for CasX variants compared to wild-type reference CasX

[0904] Cleavage-competent fractions were also determined using the same protocol for CasX2.2.7.37, CasX2.32.7.37, CasX2.64.7.37, and CasX2.174.7.37 to be 16±3%, 13±3%, 5±2%, and 22±5%, as shown in FIG. 13 and Table 13.

[0905] A second set of guides were tested under different conditions to better isolate the contribution of the guide to RNP formation. 174, 175, 185, 186, 196, 214, and 215 guides with 7.37 spacer were mixed with CasX491 at final concentrations of 1 μM for the guide and 1.5 μM for the protein, rather than with excess guide as before. Results are shown in FIG. 14 and Table 13. Many of these guides exhibited additional improvement over 174, with 185 and 196 achieving 44% and 46% competent fractions, respectively, compared with 17% for 174 under these guide-limiting conditions.

[0906] The data indicate that both CasX variants and sgRNA variants are able to form a higher degree of active RNP with guide RNA compare to wild-type CasX and wild-type sgRNA.

[0907] The apparent cleavage rates of CasX variants 119, 457, 488, and 491 compared to wild-type reference CasX were determined using an in vitro fluorescent assay for cleavage of the target 7.37.

[0908] CasX RNPs were reconstituted with the indicated CasX (see FIG. 14) at a final concentration of 1 μM with 1.5-fold excess of the indicated guide in 1× cleavage buffer (20 mM Tris HCl pH 7.5, 150 mM NaCl, 1 mM TCEP, 5% glycerol, 10 mM MgCl₂) at 370 C for 10 min before being moved to ice until ready to use. Cleavage reactions were set up with a final RNP concentration of 200 nM and a final target concentration of 10 nM. Reactions were carried out at 370 C except where otherwise noted and initiated by the addition of the target DNA. Aliquots were taken at 0.25, 0.5, 1, 2, 5, and 10 minutes and quenched by adding to 95% formamide, 20 mM EDTA. Samples were denatured by heating at 950 C for 10 minutes and run on a 10% urea-PAGE gel. The gels were imaged with a LI-COR Odyssey CLx and quantified using the LI-COR Image Studio software or imaged with a Cytiva Typhoon and quantified using the Cytiva IQTL software. The resulting data were plotted and analyzed using Prism, and the apparent first-order rate constant of non-target strand cleavage (k_{cleave}) was determined for each CasX:sgRNA combination replicate individually. The mean and standard deviation of three replicates with independent fits are presented in Table 13, and the cleavage traces are shown in FIG. 18.

[0909] Apparent cleavage rate constants were determined for wild-type CasX2, and CasX variants 119, 457, 488, and 491 with guide 174 and spacer 7.37 utilized in each assay (see Table 13 and FIG. 15). All CasX variants had improved cleavage rates relative to the wild-type CasX2. CasX457 cleaved more slowly than 119, despite having a higher competent fraction as determined above. CasX488 and CasX491 had the highest cleavage rates by a large margin; as the target was almost entirely cleaved in the first timepoint, the true cleavage rate exceeds the resolution of this assay, and the reported k_{cleave} should be taken as a lower bound.

[0910] The data indicate that the CasX variants have a higher level of activity, with k_{cleave} rates reaching at least 30-fold higher compared to wild-type CasX2. 4. In vitro Cleavage Assays: Comparison of guide variants to wild-type guides

[0911] Cleavage assays were also performed with wild-type reference CasX2 and reference guide 2 compared to guide variants 32, 64, and 174 to determine whether the variants improved cleavage. The experiments were performed as described above. As many of the resulting RNPs did not approach full cleavage of the target in the time tested, we determined initial reaction velocities (Vo) rather than first-order rate constants. The first two timepoints (15 and 30 seconds) were fit with a line for each CasX:sgRNA combination and replicate. The mean and standard deviation of the slope for three replicates were determined.

[0912] Under the assayed conditions, the Vo for CasX2 with guides 2, 32, 64, and 174 were 20.4±1.4 nM/min, 18.4±2.4 nM/min, 7.8±1.8 nM/min, and 49.3±1.4 nM/min (see Table 13,FIG. 16 and FIG. 17). Guide 174 showed substantial improvement in the cleavage rate of the resulting RNP (˜2.5-fold relative to 2, see FIG. 17), while guides 32 and 64 performed similar to or worse than guide 2. Notably, guide 64 supports a cleavage rate lower than that of guide 2 but performs much better in vivo (data not shown). Some of the sequence alterations to generate guide 64 likely improve in vivo transcription at the cost of a nucleotide involved in triplex formation. Improved expression of guide 64 likely explains its improved activity in vivo, while its reduced stability may lead to improper folding in vitro.

[0913] Additional experiments were carried out with guides 174, 175, 185, 186, 196, 214, and 215 with spacer 7.37 and CasX491 to determine relative cleavage rates. To reduce cleavage kinetics to a range measurable with our assay, the cleavage reactions were incubated at 10° C. Results are in FIG. 18 and Table 13. Under these conditions, 215 was the only guide that supported a faster cleavage rate than 174. 196, which exhibited the highest active fraction of RNP under guide-limiting conditions, had kinetics essentially the same as 174, again highlighting that different variants result in improvements of distinct characteristics.

[0914] The data support that, under the conditions of the assay, use of the majority of the guide variants with CasX results in RNP with a higher level of activity than one with the wild-type guide, with improvements in initial cleavage velocity ranging from ˜2-fold to >6-fold.

TABLE 13
Results of cleavage and RNP formation assays

| RNP Construct | k_{cleave}* | | Initial velocity* | Competent fraction |
|---|---|---|---|---|
| 2.2.7.37 | | | 20.4 ± 1.4 nM/min | 16 ± 3% |
| 2.32.7.37 | | | 18.4 ± 2.4 nM/min | 13 ± 3% |
| 2.64.7.37 | | | 7.8 ± 1.8 nM/min | 5 ± 2% |
| 2.174.7.37 | 0.51 ± 0.01 | min⁻¹ | 49.3 ± 1.4 nM/min | 22 ± 5% |
| 119.174.7.37 | 6.29 ± 2.11 | min⁻¹ | | 35 ± 6% |
| 457.174.7.37 | 3.01 ± 0.90 | min⁻¹ | | 53 ± 7% |
| 488.174.7.37 | 15.19 | min⁻¹ | | 67% |
| 491.174.7.37 | 16.59 min⁻¹/0.293 | min⁻¹ (10° C.) | | 83%/17% (guide-limited) |
| 491.175.7.37 | 0.089 | min⁻¹ (10° C.) | | 5% (guide-limited) |
| 491.185.7.37 | 0.227 | min⁻¹ (10° C.) | | 44% (guide-limited) |
| 491.186.7.37 | 0.099 | min⁻¹ (10° C.) | | 11% (guide-limited) |
| 491.196.7.37 | 0.292 | min⁻¹ (10° C.) | | 46% (guide-limited) |
| 491.214.7.37 | 0.284 | min⁻¹ (10° C.) | | 30% (guide-limited) |
| 491.215.7.37 | 0.398 | min⁻¹ (10° C.) | | 38% (guide-limited) |

*Mean and standard deviation

### Example 15: CasX:gNA Editing of SOD1

[0915] This example sets forth the parameters to make and test compositions capable of modifying a SOD1 locus.

### Experimental Design:

[0916] A) SOD1-modifying spacer selection process:

[0917] 20 bp XTC PAM spacers were designed to target the following regions in the human genome:
[0918] (a) SOD1 cis enhancer elements as described in Fishilevich et al, 2017
[0919] (b) SOD1 proximal non-coding genetic elements highly conserved across vertebrates (UCSC genome browser)
[0920] (c) SOD1 genomic locus. The SOD1 gene is defined as the sequence that spans chr21:31659622-31668931 of the human genome (GRCh38/hg38) (the notation refers to the chromosome 21 (chr21), starting at the 31,659,622 bp of that chromosome, and extending to the 31,668,931 bp of that chromosome).

[0921] SOD1 targeting spacers may be similarly assembled from other genomes.

B) Methods for generating SOD1 targeting constructs:

[0922] In order to generate SOD1 targeting constructs, SOD1 targeting spacers were cloned into a base mammalian-expression plasmid construct (pStX) that is comprised of the following components: codon optimized CasX (construct CasX 2 (SEQ ID NO:2) and guide 2 (SEQ ID NO:5) and CasX 119 molecule and rRNA guide 64 (119.64); see Tables 2B and 6 for sequences)+NLS; guide scaffold 64, and a mammalian selection marker, puromycin. Spacer sequence DNA was ordered as single-stranded DNA (ssDNA) oligos from Integrated DNA Technologies (IDT) consisting of the spacer sequence and the reverse complement of this sequence. These two oligos were annealed together and cloned into pStX individually or in bulk by Golden Gate Assembly using T4 DNA Ligase (New England BioLabs Cat #M0202L) and an appropriate restriction enzyme for the plasmid. Assembled products were transformed into chemically- or electro-competent bacterial cells, plated on Lb-Agar plates (LB: Teknova Cat #L9315, Agar: Quartzy Cat #214510) containing carbenicillin and incubated until colonies appeared. Individual colonies were picked and miniprepped using a Qiagen Qiaprep® spin Miniprep Kit (Qiagen Cat #27104), following the manufacturer's protocol. The resultant plasmids were sequenced using Sanger sequencing to ensure correct ligation. SaCas9 and SpyCas9 control plasmids, with spacers chosen based on Cas protein-specific PAMs, were prepared similarly to pStX plasmids described above.

C) Methods to generate SOD1 reporter line:

[0923] A GFP-encoding DNA was knocked in at the 3′ end of the last SOD1 exon in a HEK293T cell line. The modified cells were expanded by serial passage every 3-5 days and maintained in Fibroblast (FB) medium, consisting of Dulbecco's Modified Eagle Medium (DMEM; Corning Cellgro, #10-013-CV) supplemented with 10% fetal bovine serum (FBS; Seradigm, #1500-500), and 100 Units/ml penicillin and 100 mg/ml streptomycin (100×-Pen-Strep; GIBCO #15140-122), and can additionally include sodium pyruvate (100×, Thermofisher #11360070), non-essential amino acids (100× Thermofisher #11140050), HEPES buffer (100× Thermofisher #15630080), and 2-mercaptoethanol (1000× Thermofisher #21985023). The cells were incubated at 37° C. and 5% CO2. After 1-2 weeks, single GFP+cells were sorted into FB medium. The reporter line clones were expanded by serial passage every 3-5 days and maintained in FB medium in an incubator at 37° C. and 5% CO2. The lines were characterized via genomic sequencing, and functional modification of the SOD1 locus using a SOD1 targeting molecule. The optimal reporter lines were identified as ones that i) had a single copy of GFP correctly integrated at the target SOD1 locus, ii) maintained doubling times equivalent to unmodified cells, iii) resulted in reduction in GFP fluorescence upon disruption of the SOD1 gene when assayed using the methods described, below.

D) Methods to assess SOD1 modifying activity in SOD1-GFP reporter cell line:

[0924] SOD1-GFP reporter cells were seeded at 20-40k cells/well in a 96 well plate in 100 μl of FB medium and cultured in a 37C incubator with 5% CO2. The following day, confluence of seeded cells was checked. Ideally, cells should be at ˜75% confluence at time of transfection. If cells were at the right confluence, transfection was carried out.

[0925] Each CasX construct (CasX 2 (SEQ ID NO:2) and guide 2 (SEQ ID NO:5) and CasX 119 and guide 64, see Tables for sequence) with appropriate spacer targeting SOD1 was transfected at 100-500 ng per well using Lipofectamine™ 3000 following the manufacturer's protocol, using 3 wells per construct as replicates. SaCas9 and SpyCas9 targeting SOD1 were used as benchmarking controls. For each Cas protein type, a non-targeting plasmid was used as a negative control.

[0926] After 24-48 hours of puromycin selection at 0.3-3 ug/ml, to select for successfully transfected cells, followed by 24-48 hours of recovery in FB medium, GFP fluorescence in transfected cells was analyzed via flow cytometry. In this process, cells were gated for the appropriate forward and side scatter, selected for single cells and then gated for reporter expression (Attune Nxt Flow Cytometer, Thermo Fisher Scientific) to quantify the expression levels of fluorophores. At least 10,000 events were collected for each sample. The data were then used to calculate the percentage of antibody-label negative (edited) cells.

[0927] A subset of cells for each sample from the example was lysed, and genome extracted using a Quick extract solution following the manufacturer's protocol. Editing was analyzed using a T7E1 assay. Briefly, the genomic locus at the targeted edit site was amplified using primers (e.g., a 500 bp region around the intended target) using a PCR program on a thermocycler. The PCR amplicon was then hybridized following a hybridization program on a thermocycler, and then treated with T7 Endonuclease for 30 mins at 37C. The sample was then analyzed on a 2% agarose gel, or on a Fragment Analyzer to visualize DNA bands.

E) Methods to assess SOD1 modifying activity in SYSY cells:

[0928] SY5Y cells (Cell Culture Facility, UC Berkeley) were seeded at 20-40k cells/well in a 96 well plate in 100 μl of FB medium and cultured in a 37° C. incubator with 5% CO2. The following day, confluence of seeded cells was checked. Ideally, cells should be at ˜75% confluence at time of transfection. If cells were at the right confluence, transfection was carried out.

[0929] CasX construct 119 with guide 64 and appropriate spacer targeting SOD1 was transfected at 100-500 ng per well using Lipofectamine™ 3000 following the manufacturer's protocol, and placed into 3 wells per construct as replicates. A non-targeting plasmid was used as a negative control. After 24-48 hours of puromycin selection at 1-3 ug/ml to select for successfully transfected cells, followed by 24-48 hours of recovery in FB medium, cells were analyzed for editing by the T7E1 assay as described above.

F) Methods to assess SOD1 modifying via a lentiviral screen

[0930] Lentiviral plasmids are cloned as described above and following standard cloning procedures such that each lentiviral plasmid has one spacer-guide scaffold targeting SOD1 and one codon optimized NLS bearing CasX molecule (e.g., construct CasX 119 molecule and rRNA guide 64 (119.64)) with a puromycin selection marker. The cloning is carried out such that the final titer encompasses the full library size by >100× of all possible SOD1 spacers targeting all known PAMs and their corresponding spacer regions in the SOD1 gene. If ˜5,000 was the library size; the libraries evaluated would be >5×10⁵.

[0931] Lentiviral particles are produced by transfecting HEK293T at a confluency of 70%-90% using polyethylenimine based transfection of plasmids containing the spacer library, the lentiviral packaging plasmid and the VSV-G envelope plasmids. For particle production, media is changed 12 hr. post-transfection, and virus harvested at 36-48 hr. post-transfection.

[0932] Viral supernatants are filtered using 0.45 um membrane filters, diluted in FB media if appropriate, and added to target cells, in this case the SOD1-GFP reporter cell line. Supplement polyberene is added at 5-20 ug/ml to enhance transduction efficiency, if necessary. Transduced cells are selected for 24-48 hr. post-transduction using puromycin at 0.3-3 ug/ml in FB medium, and grown for 7-10 days in FB medium in a 37C incubator with 5% CO2.

[0933] Cells are sorted on a SH-100 or MA900 SONY sorter. In this process, cells are gated for the appropriate forward and side scatter, selected for single cells and then gated for reporter expression. Different cell sorting gates are established based on fluorescence level (OFF=full KO, Med=partial disruption or knockdown (KD), High=no edit, Very High=Enhancer) to distinguish between and collect cells editing by i) highly functional SOD1 disrupting molecules, ii) molecules that only lower expression, and iii) molecules that increase expression. This assay can also be run to identify allele specific guides if two colors are used in human patient cells. Genomic DNA are collected from each group of sorted cells using Quick Extract (Lucigen Cat #QE09050) solution following manufacturer's recommended protocol.

[0934] Spacer libraries from each collected pool are then amplified via PCR directly from the genome and collected for deep sequencing on a Miseq™. Analysis of the spacers is done according to gate and abundance for a specific activity; see below for detailed methods for NGS analysis of spacer hits.

[0935] Selected guides from each sorted group are then re-cloned and individually validated in reporter cell line and in primary human cell lines for activity by flow cytometry and T7E1 assay, and indel spectrum assessed by NGS analysis. Steps followed may be similar to the description provided under Methods to assess SOD1 modifying activity in reporter cell line.

G) Methods for NGS analysis of spacer hits

[0936] Provided here are methods on how to analyze the next generation sequencing (NGS) data coming from above described lentiviral screen. Spacers are each assessed for ability to disrupt a SOD1 gene using NGS.

[0937] NGS libraries are generated through specific amplification of the lentiviral backbone containing the spacer. A different library is generated for each of the sorted populations (GFP high, med, low, etc., corresponding to low, med, high SOD1 expression), and then assessed with the Illumina Hiseq.

[0938] Sequencing reads from the Illumina Hiseq are trimmed for adapter sequences and for regions of low sequencing quality. Paired end reads are merged based on their overlap sequence to form a single consensus sequence per sequenced fragment. Consensus sequences are aligned to the designed spacer sequences using bowtie2. Reads aligning to more than one designed spacer sequence are discarded.

[0939] The ‘abundance’ of each spacer sequence is defined as the number of reads aligning to that sequence. The abundance is tabulated for each sequencing library, forming a count table giving the abundance for each spacer sequence across each of the sequencing libraries (i.e., sorted populations). Finally, the numbers of abundances are then normalized to account for the differing sequencing depth of each library by dividing by the overall read count in that library, multiplied by the mean read count across libraries. The normalized count table is used to determine the activity of each spacer in each gate (high, medium, low, etc.).

### Results:

[0940] A SOD1-GFP reporter line was constructed by knocking in GFP at the endogenous human SOD1 locus, shown schematically in FIG. 19. A reporter (e.g., GFP reporter) coupled to a gRNA targeting sequence, complementary to the gRNA spacer, is integrated into a reporter cell line. Cells are transformed or transfected with a CasX protein and/or sgRNA variant, with the spacer motif of the sgRNA complementary to and targeting the gRNA target sequence of the reporter. The ability of the CasX:sgRNA ribonucleoprotein complex to cleave the target nucleic acid sequence is assayed by FACS. Cells that lose reporter expression indicate occurrence of CasX:sgRNA ribonucleoprotein complex-mediated cleavage and indel formation. The reporting system is based on reduced GFP fluorescence upon successful modifying (editing) of the SOD1 locus, detected by flow cytometry as shown in FIG. 20.

[0941] In an initial screen, two SOD1 spacers of the gNA were tested. The spacers 2 (with an encoding sequence ATGTTCATGAGTTTGGAGAT (SEQ ID NO: 310)) and 4 (with an encoding sequence TCGCCATAACTCGCTAGGCC (SEQ ID NO: 366)) were tested with the CasX protein (construct CasX 2 (SEQ ID NO:2) and guide 2 (SEQ ID NO:5)), using SaCas9 and SpyCas9 as controls, in the reporter cell line. The reduction in GFP fluorescence and editing, shown in FIGS. 20 and 21. FIG. 21 shows the edits results of the CasX SOD1 targeting spacers 2 and 4 (first two bars) and benchmarking controls Sa.Cas9 and Spy.Cas9 (second two bars) which were lipofected into SOD1-GFP reporter cells, selected for successful lipofection using puromycin, and later assayed for GFP disruption via FACS. The CasX 2 (SEQ ID NO:2) and guide 2 (SEQ ID NO:5) is shown to edit 5-10% of cells, demonstrating that CasX can modify the endogenous SOD1 locus, and did so more effectively than the SaCas9 and SpyCas9. A T7E1 assay was performed to assay gene editing in the SOD1-GFP reporter cell line. CasX 2 (SEQ ID NO:2) and guide 2 (SEQ ID NO:5) with SOD1 targeting spacer (with an encoding sequence of TCGCCATAACTCGCTAGGCC (SEQ ID NO: 366)) and non-targeting control (NT) were lipofected into SOD1-GFP reporter cells, selected for successful lipofection using puromycin, and later assayed for gene editing in the T7E1 assay. An agarose gel image from the T7E1 assay shown in FIG. 22 demonstrates successful editing of the SOD1 locus, indicated by the double arrows.

[0942] FIG. 23 shows the results of gene editing in the SOD1-GFP reporter cell line. CasX 2 (SEQ ID NO:2) and guide 2 (SEQ ID NO:5) (labeled here as StX) and CasX 119 molecule and rRNA guide 64 (119.64) (labeled here as EvoX1) with SOD1 targeting spacers (2, with an encoding sequence of ATGTTCATGAGTTTGGAGAT (SEQ ID NO: 310), and spacer 4, with an encoding sequence of TCGCCATAACTCGCTAGGCC (SEQ ID NO: 366)), were lipofected into SOD1-GFP reporter cells, selected for successful lipofection using puromycin, and later assayed for GFP disruption via FACS. FIG. 5 shows that CasX 119 with guide 64 edits substantially better than CasX 2 (SEQ ID NO:2) and guide 2 (SEQ ID NO:5); in particular, in the case of spacer 2, CasX 119 with guide 64 shows 35-fold higher editing compared to CasX 2 (SEQ ID NO:2) and guide 2 (SEQ ID NO:5).

[0943] FIG. 23 demonstrates that another CasX variant, construct 119 with guide 64, modifies the SOD1 locus with a 35-fold higher efficiency compared to CasX 2 (SEQ ID NO:2) and guide 2 (SEQ ID NO:5), as measured via flow cytometry of modified SOD1-GFP reporter cells. Rates of about 60% for modifying at the endogenous SOD1 locus were achieved; equal or greater than efficiency demonstrated with SaCas9 (data not shown). The spacers used in these examples are pictorially depicted in FIG. 24, with the CasX SOD1 targeting spacer 4 (SOD1.4) and a SpyCas9 targeting spacer (Spy_SOD1.1) located in Exon 1. The CasX SOD1 targeting spacer 2 (SOD1.2) and a SauCas9 targeting spacer (Sau_SOD1.1) are located in Exon 2.

[0944] FIG. 25 shows the results of gene editing in the SYSY cell line. CasX 119 and rRNA guide 64 with a SOD1 targeting spacer (with an encoding sequence of TCGCCATAACTCGCTAGGCC (SEQ ID NO: 366)) and non-targeting control (NT) were lipofected into SYSY cells, selected for successful lipofection using different concentrations of puromycin (1, 2 or 3 ug/ml), and later assayed for gene editing in the T7E1 assay. The agarose gel image from the T7E1 assay shown in FIG. 25 demonstrates successful editing of the SOD1 locus. The double arrows show the two DNA bands as a result of successful editing in cells selected with 3 μg/ml puromycin.

[0945] FIG. 26 shows that spacers with improved ability to edit the SOD1 gene can be identified from the screening method described here. Approximately 5000 different spacers, designed as described in SOD1-modifying spacer selection process were assessed for activity in the SOD1-GFP reporter cell line. The left panel shows that unbiased clustering of the spacers by activity, as described in Methods for NGS analysis of spacer hits across 13 different measurements results in 20 distinct clusters, with cluster 1 containing the most active spacers. 42 of these most active spacers are shown in the middle panel, ranked from top to bottom by activity. The right panel shows that the most active spacers identified in the spacer screen indeed maintain their activity when individually tested via lipofection of CasX construct 119 with scaffold 174 and the respective spacers in the SOD1-GFP cell line.

[0946] Conclusions: This example demonstrates that CasX constructs can edit the SOD1 locus in multiple mammalian cell lines. A CasX variant, 119 with guide 64, was found to edit 35-fold better than the previous CasX 2 (SEQ ID NO:2) and guide 2 (SEQ ID NO:5) in some instances, indicating that CasX variants can be designed with improved editing capabilities.

### Example 16: Generation and Assay of AAV Vectors Delivering CasX Constructs Targeting SOD1

[0947] This example describes a typical protocol followed to produce and characterize AAV2 vectors packaging CasX molecules and guides.

### Materials and Methods:

[0948] For AAV production, the tri-plasmid transfection method was used, using three essential plasmids—pTransgene carrying the gene of interest to be packaged in AAV, pRC, and pHelper. DNA encoding CasX and guide RNA were cloned into an AAV transgene cassette, between the ITRs (FIG. 27) to generate the pTransgene plasmid. The DNA segment between the AAV inverted terminal repeats (ITRs), comprised of a CasX-encoding DNA and its promoter, and scaffold-encoding DNA and its promoter gets packaged within an AAV capsid during AAV production. The constructed transgene plasmid was verified via full-length plasmid sequencing (see Table 14), restriction digestion, and functional tests including in vitro transfection of mammalian cells. Additional plasmids required for AAV production (pRC plasmid and pHelper plasmid) were purchased from commercial suppliers (Aldevron, Takara).

[0949] For AAV production, HEK293/T cells were cultured in FB medium in a 37° C. incubator with 5% C02. 10-20 15 cm dishes of HEK293T cells were used in a single batch of viral production. For a single 15 cm dish, 15 ug of each plasmid was first mixed together in 4 ml of FB medium, and complexed with 145 ug polyethyleneimine (PEI) i.e., at 3 ug PEI/ug of DNA, for 10 mins at room temperature. The ratio of the three plasmids used may be varied to further optimize virus production as needed.

[0950] The PEI-DNA complex was then slowly dripped onto the 15 cm plate of HEK293T cells, and the plate of transfected cells moved back into the incubator. The next day, the medium was changed to FB with 2% FBS (instead of 10% FBS). At 3 days post-transfection, the media from the cells may be collected to increase virus yields. At 5-6 days post-transfection medium and cells were collected. The timing of harvest may be further varied to optimize virus yield.

[0951] The cells were pelleted by centrifugation, and the medium collected from the top. Cells were lysed in a buffer with high salt content and high-salt-active nuclease for 1 h at 37° C. The cells may also be lysed using additional methods, such as sequential freeze-thaw, or chemical lysis by detergent.

[0952] The medium collected at harvest, and any medium collected at earlier time points, were treated with a 1:5 dilution of a solution containing 40% PEG8000 and 2.5M NaCl, and incubated on ice for 2h, in order to precipitate AAV. The incubation may also be carried out overnight at 4° C.

[0953] The AAV precipitate from the medium was pelleted by centrifugation, resuspended in high salt content buffer with high-salt-active nuclease and combined with the lysed cell pellet. The combined cell lysate was then clarified by centrifugation and filtration through a 0.45 um filter, and purified on an AAV Poros affinity resin column (Thermofisher Scientific). The virus was eluted from the column into a neutralizing solution. At this stage, the virus may be taken through additional rounds of purification to increase the quality of the virus preparation.

[0954] The eluted virus was then titered via qPCR to quantify the virus yield. For titering, a sample of virus was first digested with DNAse to remove any non-packaged viral DNA, the DNAse deactivated, and then viral capsids disrupted with Proteinase K to expose the packaged viral genomes for titering.

### Results:

[0955] Representative titers for AAV packaging DNA encoding a CasX 119 molecule and rRNA guide 64 (119.64) with a spacer having the sequence ATGTTCATGAGTTTGGAGAT (SEQ ID NO: 310) is shown in FIG. 28. During AAV purification, flow through (FT) and consecutive eluent fractions (1-6) are collected and titered by qPCR. Most virus, ˜1×10¹⁴ viral genomes in this example, is found in the second elution fraction. Typically, ˜1×10¹² viral genomes were obtained from one batch of virus production as described here.

[0956] Conclusion: This example demonstrates that i) CasX and a gNA can be cloned into an AAV transgene construct, and ii) CasX and guide can be packaged in an AAV vector and produced at sufficiently high titers.

TABLE 14
Plasmid Sequence

| Construct | DNA sequence |
|---|---|
| pStX17 | (SEQ ID NO: 367) |

### Example 17: Administration of AAV Vectors Encoding a CasX System In Vitro and Evidence of SOD1 Gene Editing

### Materials and Methods:

[0957] SOD1-GFP reporter cells were seeded at 30k cells/well in a 96 well plate in 100 ul of FB medium. Confluence of cells was checked the next day, and cells were transduced at 80% confluence with AAV vectors. CasX 119 molecule and rRNA guide 64 (119.64) with SOD1 targeting spacer (2, with an encoding sequence of ATGTTCATGAGTTTGGAGAT (SEQ ID NO: 310)) and SauCas9 with SOD1 targeting spacer were packaged in AAV vectors and used to transduce SOD1-GFP reporter cells at a range of different multiplicity of infection (MOIs, no. of viral genomes/cell), for example from 1 to 1×10⁷ viral genomes per cell. In a separate experiment, neural progenitor cells from the G93A mouse model of ALS (G93A NPCs) were similarly transduced. NPCs are cultured in NPC medium (DMEMF12 with Glutamax, supplemented with 10 mM Hepes (100× Thermofisher #15630080), non-essential amino acids (100× Thermofisher #11140050), penicillin-streptomycin (100×-Pen-Strep; GIBCO #15140-122), 2-mercaptoethanol 1000× (Thermofisher #21985023), B27 without vitamin-A (50×, Thermofisher), N2 (100×, Thermofisher), 20 ng/ml bFGF (Biolegend Cat no #579606), and 20 ng/ml EGF (Thermofisher #PHG0311)) at 37° C. and 5% CO2. The AAV doses were calculated based on viral titers determined by qPCR. Fresh FB medium or NPC medium may be replenished the next day, or as needed. Starting at 5 days post-transduction, and weekly thereafter, a portion of the cells were analyzed via flow cytometry or T7E1 assay.

[0958] In a second AAV-mediated gene editing in the SOD1-GFP reporter cell line, CasX 119 molecule and rRNA guide 64 (119.64) with SOD1 targeting spacer (2, with an encoding sequence of ATGTTCATGAGTTTGGAGAT (SEQ ID NO: 310)) and SauCas9 with SOD1 targeting spacer were packaged in AAV vectors and used to transduce SOD1-GFP reporter cells at a range of different multiplicity of infection (MOIs, no. of viral genomes/cell). Twelve days later, cells were assayed for GFP disruption via FACS.

[0959] Another AAV-mediated gene editing experiment was conducted in neural progenitor cells (NPCs) from the G93A mouse model of ALS. CasX 119 molecule and rRNA guide 64 (119.64) with SOD1 targeting spacer (2, with an encoding sequence of ATGTTCATGAGTTTGGAGAT (SEQ ID NO: 310)) was packaged in an AAV vector and used to transduce G93A NPCs at a range of different multiplicity of infection (MOIs, no. of viral genomes/cell). Twelve days later, cells were assayed for gene editing via T7E1 assay.

### Results:

[0960] A representative example of SOD1 editing, as demonstrated by percentage of GFP negative cells, at 12 days post-transduction is shown in FIG. 29 and FIG. 30.

[0961] Twelve days later, cells were assayed for GFP disruption via FACS. In this example, CasX and SauCas9 shows equivalent levels of editing, where 1-2% of the cells show GFP disruption at the highest MOIs, 1×10⁷ or 1×10⁶ (FIG. 29). In FIG. 30, CasX and SauCas9 shows equivalent levels of editing at the highest MOI, where ˜2-4% of the cells show GFP disruption. FIG. 31 shows an agarose gel image from the T7E1 assay, demonstrating successful editing of the SOD1 locus by CasX delivered via AAV. Double arrows show the two DNA bands as a result of successful editing of the SOD1 locus in G93A NPCs.

[0962] Conclusion: This example demonstrates that CasX constructs targeting SOD1 may be delivered to mammalian cells via AAV, and result in successful editing of the SOD1 locus.

### Example 18: Demonstrating Allele-Specific Editing at the A4V SOD1 Locus

[0963] The purpose of this example was to demonstrate the proof-of-concept ability of CasX:gNA systems to edit the SOD1 gene at the A4V locus in an allele-specific manner. In order to generate SOD1 targeting constructs, SOD1 targeting spacers were cloned into a base mammalian-expression plasmid construct (pStX34) that is comprised of the following components: codon-optimized CasX (construct 119; see Example 2)+NLS; guide scaffold, and a mammalian selection marker, puromycin. The spacer sequence DNA (WT CasX SOD1 spacer 8.88, having the sequence GCACGCACACGGCCTTCGTC (SEQ ID NO: 368) and CasX A4V spacer 8.89 having the sequence GCACGCACACGACCTTCGTC (SEQ ID NO: 369)) was ordered as single-stranded DNA (ssDNA) oligos from Integrated DNA Technologies (IDT), consisting of the spacer sequence and the reverse complement of this sequence. These two oligos were annealed together and cloned into pStX individually or in bulk by Golden Gate Assembly using T4 DNA Ligase (New England BioLabs Cat #M0202L) and an appropriate restriction enzyme for the plasmid. Assembled products were transformed into chemically- or electro-competent bacterial cells, plated on LBb-Agar plates (LB: Teknova Cat #L9315, Agar: Quartzy Cat #214510) containing carbenicillin. Individual colonies were picked and miniprepped using Qiagen Qiaprep® spin Miniprep Kit (Qiagen Cat #27104) following the manufacturer's protocol. The resultant plasmids were sequenced using Sanger sequencing to ensure correct ligation. One strategy to permanently treat SOD1-related ALS is to specifically disrupt the mutant copy of the gene with the A4V mutation while sparing the WT allele. SOD1-GFP cells with both wild-type alleles should be editable by the WT CasX spacer (8.88, having the RNA sequence GCACGCACACGGCCUUCGUC (SEQ ID NO: 370)), but not by the mutant CasX spacer (8.89 having the RNA sequence GCACGCACACGACCUUCGUC (SEQ ID NO: 371)). This example additionally demonstrates the ability of CasX spacers to distinguish between on-target and off-target alleles that differ by a single nucleotide. SOD1-GFP cells were seeded at 20-40k cells/well in a 96 well plate in 100 μl of FB medium and cultured in a 37° C. incubator with 5% CO2. The following day, confluence of seeded cells was checked to ensure that cells were at ˜75% confluence at time of transfection. If cells were at the right confluence, transfection was carried out. Each CasX and guide construct (e.g., CasX 119 with guide 174) was transfected into the SOD1-GFP cells at 100-500 ng per well using Lipofectamine™ 3000 following the manufacturer's protocol, using 3 wells per construct as replicates. A non-targeting plasmid was used as a negative control. Cells were selected for successful transfection with puromycin at 0.3-3 g/ml for 24-48 hours followed by 24-48 hours of recovery in FB medium. Editing was analyzed by measuring the fraction of cells expressing the reporter protein, GFP, via flow cytometry.

[0964] Results: As shown in FIG. 32, flow cytometry demonstrated that the CasX 119, guide 174 and spacer 8.88 construct was able to edit the WT SOD1 locus in SOD1-GFP cells when targeted to the A4 locus using a spacer that targets the WT sequence (on-target). A CasX construct with spacer 8.89 that targets the mutant sequence (off-target), was not able to edit the WT locus with significantly lower efficiency.

[0965] Conclusion: This example demonstrates that CasX with an appropriate guide and spacer is able to edit the A4 SOD1 locus in an allele-specific manner.

### Example 19: Evaluation of SOD1 Gene Editing in Mouse Model of ALS

[0966] The purpose of the examples will be to evaluate the efficacy of CasX:gNA systems used to edit SOD1 mutations in an established mouse model of ALS.

[0967] Experimental design: T test article will be evaluated using transgenic overexpressing G93A mutant SOD1 mice. Time pregnant mice (both G93A mutants and wild-type controls) will be purchased from Jackson Labs. Upon receipt, mice will be single housed in OptiMice ventilated racks and acclimated prior to use. On the day of dosing, animals are anesthetized via cryoanesthesia and dosed ICV with a dose volume of 1 μl/g or no more than 2 μl of solution. A micro-liter calibrated sterilized glass micropipette is used that is attached to a 10 uL Hamilton syringe. The needle tip is adjusted to correct length for a 2 mm penetration into the skull. The immobilized mouse is firmly grasped by the skin behind the head. A fiber optic light is used to illuminate relevant anatomical structures used as a guide. The needle will penetrate, perpendicularly, 2 mm into the skull, for ICV at a location approximately 0.25 mm lateral to the sagittal suture and 0.50-0.75 mm rostral to the neonatal coronary suture. Dosing solution will be dispensed slowly (about 1 μl/sec). Body weights will be measured twice a week throughout the study.

[0968] Clinical Scoring: Mice will be scored for disease progression twice a week and then daily after 15 weeks of age according to the following scale:
[0969] Stage 0: No symptoms;
[0970] Stage 1: Body tremor, leg tremor, spiked fur, slowed locomotor behavior. Mouse will look generally un-groomed and slightly weak. Normal righting reflex
[0971] Stage 2: Hind limb dragging, paw curling, ataxia, slower righting reflex, hind limb splay, stage 1 symptoms.
[0972] Stage 3: Hind limb paralysis, hair loss, slightly emaciated, lack of rearing ability, delayed righting reflex, stage 2 symptoms.
[0973] Stage 4: Unable to walk and lying on side, hunched back, paralysis of 2 or more limbs, emaciated, delayed righting reflex, prolapsed penis, stage 3 symptoms.

[0974] Mice that are unable to right within 30 sec, mouse will be euthanized.

[0975] Grip Strength: Grip strength is used to assess muscular strength in limb muscles. Mice are held by the tail and lowered towards the mesh grip piece on the push-pull gauge (San Diego Instruments, San Diego, CA) until the animal grabs with both front paws. The animal is lowered toward the platform and gently pulled backwards with consistent force by the experimenter until it releases its grip. The forelimb grip force is recorded on the strain gauge. The experimenter continues to pull the animal backwards along the platform until the animal's hind paws grab the mesh grip piece on the push-pull gauge. The animal is gently pulled backwards with consistent force by the experimenter until it releases its grip. The hind limb grip force is recorded on the strain gauge. After testing animals are placed back into the test or home cage. Grip strength commences when mice are 5 weeks of age and is measured every other week until mice are not able to perform task.

[0976] Rotarod: Motor coordination will be assessed by rotarod. Mice will be placed on a constant speed rotating rod (4 rpm) followed by 2 trials on an accelerating rotating rod (4-28 rpm). The time it takes the mice to fall in each of the trials is recorded. The duration of each trial is 3 min. After rotarod testing animals are placed back into the home cage. Rotarod test commences when mice are 5 weeks of age and resumes every other week until animals are not able to perform

[0977] CMAP: Mice will be anesthetized by isoflurane/O2 sufficient anesthesia by testing simple reflexes such as movement reflexes or testing of sensitivity for low-grade pain. Hair will be removed from the hind limb. Skin will be cleaned with alcohol to remove any dirt and body oil. Body temperature will be maintained by a feedback controlled heating plate and rectal thermo probe. Place loop electrodes using contact gel for optimal conductivity/transfer resistance are placed at the position where the gastrocnemius muscle has its maximum diameter. The reference electrode is placed just beneath the effective electrode. Leads will be connected to the EMG machine (Nicolet Viking Quest, Natus Neurology, Middleton, MI, USA). Five responses evoked by stimulation will be averaged to generate a smooth compound muscle action potential (CMAP). Then the amplitude and the onset latency will be measured based on the averaged CMAPs. Nerve conduction velocity (NCV) can be calculated from the response latency and the distance from stimulating electrode to recording electrode. For MUNE calculation, a maximum CMAP is obtained first by increasing stimulating intensity until the response no longer increases. Then the average single motor unit potential (SMUP) is determined using incremental stimulation technique. Starting from an all-or-none response, 10 increments will be summed and averaged. Then the maximum CMAP will be divided by average SMUP to obtain MUNE number. CMAP and MUNE will be measured at 5 weeks, 9, 13, 17, 20 weeks of age.

[0978] Righting Reflex and survival: Righting reflex is used as a surrogate for survival. The animal is simply placed on its back on a flat surface and the time taken to right itself is measured (up to 0.5 min). Only one trial per mouse at each time point is performed. Righting reflex testing will commence when mice are 15 weeks of age and will be performed daily until the mice can no longer right themselves. Mice will be euthanized if no longer able to right themselves.

[0979] At the end of each study period, mice are decapitated and trunk blood is collected in microcentrifuge tubes containing EDTA and kept on ice for short term storage. Within 15 minutes the tubes are centrifuged in a refrigerated centrifuge. Plasma is extracted and samples are stored in the −80° C. freezer for future analyses. Brains will be removed and frozen on dry ice. Samples will be stored at −80° C. freezer for future histopathology or other analyses. Spinal Cord: After the removal of the brain, the spinal cord is extracted. A 3 ml syringe attached to a 200 μl pipette tip is filled with saline and used for spinal cord flushing. The pelvic region is cut horizontally so the spinal column could be visible. Once the pelvic area is cut, the pipette tip is inserted through the small opening visible at the base of the spinal column and the spinal cord is flushed out. The whole spinal cord is frozen in pre-chilled Eppendorf tubes on dry ice. Samples are stored in the −80° C. freezer for future histopathology or other analyses.

[0980] Results: The data from the example are expected to provide information on the efficacy of the CasX:gNA to prevent or ameliorate ALS conditions in the mouse model.

1-168. (canceled)

169. A method of treating a superoxide dismutase 1 (SOD1)-related disease in a subject in need thereof, the method comprising the step of administering to the subject an effective dose of a composition comprising or encoding:
(1) a CasX variant protein comprising an amino acid sequence of SEQ ID NO: 126 or a sequence having at least 70% sequence identity thereto, wherein the CasX variant protein is a chimeric CasX protein comprising protein domains from two or more different CasX proteins, and
(2) a guide nucleic acid (gNA), wherein the gNA comprises a targeting sequence complementary to a SOD1 gene target nucleic acid sequence comprising one or more mutations,
thereby modifying a SOD1 gene having one or more mutations in a central nervous system (CNS) or peripheral nervous system (PNS) cell of the subject.

170. The method of claim 169, wherein the one or more mutations are in a region of the SOD1 gene selected from the group consisting of:
a) a SOD1 intron;
b) a SOD1 exon;
c) a SOD1 intron-exon junction;
d) a SOD1 regulatory element; and
e) an intergenic region.

171. The method of claim 169, wherein the one or more mutations of the SOD1 gene are selected from the group consisting of an insertion, a deletion, a substitution, a duplication and an inversion of one or more nucleotides as compared to a wild-type SOD1 gene sequence.

172. The method of claim 171, wherein the one or more mutations comprise a gain of function mutation.

173. The method of claim 169, wherein the one or more mutations in the SOD1 gene target nucleic acid sequence encode a mutation selected from the group consisting of A4S, A4T, A4V, C6F, V7E, L8Q, L8V, G12R, V14G, V14M, G16S, F20C, E21G, E21K, Q22L, G37R, L38R, L38V, G41D, G41S, H43R, F45C, H46R, H48Q, H48R, E49K, T54R, N65S, L67P, L67R, G72S, D76Y, H80A, L84F, L84V, G85R, N86S, V87A, A89T, A89V, D90A, D90V, G93A, G93C, G93D, G93R, G93V, A95G, V97M, E100G, E100K, D101G, D101N, 1104F, S105L, L106V, G108V, C111Y, I112M, 1112T, I113T, G114A, R115G, V118L, D124G, D124V, D125H, L126S, S134N, N139K, L144F, L144S, A145T, C146R, G147R, V148G, V1481, 1149T and 1151T as compared to a wild-type SOD1 protein sequence of SEQ ID NO: 100 without the N-terminal methionine.

174. The method of claim 169, wherein the SOD1 gene encodes a protein comprising an A4V substitution, a D90A substitution or a G93A substitution as compared to a wild-type SOD1 protein sequence of SEQ ID NO: 100 without the N-terminal methionine.

175. The method of claim 169, wherein the SOD1 gene encodes a non-functional SOD1 protein.

176. The method of claim 169, wherein the gNA is a guide ribonucleic acid (gRNA).

177. The method of claim 176, wherein the gRNA is a single-molecule gRNA (sgRNA).

178. The method of claim 176, wherein the gRNA comprises a scaffold stem loop sequence of CCAGCGACUAUGUCGUAGUGG (SEQ ID NO: 20) or a sequence with at least 1, 2, 3, 4 or 5 mismatches thereto.

179. The method of claim 176, wherein the gRNA comprises a scaffold sequence comprising the sequence of SEQ ID NO: 2238 or a sequence having at least about 70% sequence identity thereto.

180. The method of claim 169, wherein the targeting sequence of the gNA is complementary to a sequence of a SOD1 exon, to a sequence of a SOD1 intron, to a sequence of a SOD1 intron-exon junction, to a sequence of a SOD1 regulatory element, to a sequence of a sequence of an intergenic region of the SOD1 gene or to a sequence comprising one or more single nucleotide polymorphisms (SNPs) of the SOD1 gene.

181. The method of claim 169, wherein the targeting sequence of the gNA is complementary to a sequence of a SOD1 exon 1 or is complementary to a target nucleic acid sequence encoding a A4V substitution, a D90A substitution or a G93A substitution as compared to the wild-type SOD1 protein sequence of SEQ ID NO: 100 without the N-terminal methionine.

182. The method of claim 169, wherein the CasX variant protein further comprises one or more nuclear localization signals (NLS).

183. The method of claim 169, wherein the modifying step further comprises introducing a single-stranded break or a double-stranded break in the SOD1 gene target nucleic acid sequence of the CNS or PNS cell.

184. The method of claim 169, wherein the modifying step further comprises introducing an insertion, deletion, substitution, duplication or inversion of one or more nucleotides in the SOD1 gene.

185. The method of claim 169, wherein the SOD1 gene is modified so that expression of the SOD1 protein is reduced as compared to a cell that has not been contacted with the composition.

186. The method of claim 169, wherein the contacting comprises administering to the subject a vector comprising a nucleic acid encoding the CasX variant and a nucleic acid encoding the gNA.

187. The method of claim 186, wherein the vector is an adeno-associated viral (AAV) vector.

188. The method of claim 169, wherein the contacting comprises administering to the subject a virus-like particle (VLP) comprising the CasX variant protein and the gNA associated together as a ribonuclear protein (RNP) complex.

189. The method of claim 169, wherein the composition is administered to the subject by a route of administration selected from intraparenchymal, intravenous, intraarterial, intracerebroventricular, intracisternal, intrathecal, intracranial, lumbar, intraperitoneal, or combinations thereof.

190. The method of claim 169, wherein the subject is selected from the group consisting of a rodent, a mouse, a rat, a non-human primate and a human.

191. The method of claim 169, wherein the CNS or PNS cell that is modified is selected from the group consisting of neuron cells, glial cells and Schwann cells.

192. The method of claim 169, wherein the SOD1-related disease is amyotrophic lateral sclerosis (ALS).

193. The method of claim 169, wherein the method results in improvement in at least one clinically-relevant endpoint selected from the group consisting of ALS Functional Rating Scale (ALSFRS-(R)), combined assessment of function and survival, duration of response, time to death, time to tracheostomy, time to persistent assisted ventilation (DTP), forced vital capacity (% FVC); manual muscle test, maximum voluntary isometric contraction, duration of response, progression-free survival, time to progression of disease and time-to-treatment failure.

The application's sequence listing, which the Patent Office published only in electronic form, follows.

SEQUENCE LISTING (12496 sequences)

SEQ ID NO: 1 - protein, 986 aa, unidentified
  REGION 1..986: note = Deltaproteobacteria sp.
MEKRINKIRKKLSADNATKPVSRSGPMKTLLVRVMTDDLKKRLEKRRKKPEVMPQVISNNAANNLRMLLDDYTKMKEAILQVYWQEFKDDHVGLMCKFAQPASKKIDQNKLKPEMDEKGNLTTAGFACSQCGQPLFVYKLEQVSEKGKAYTNYFGRCNVAEHEKLILLAQLKPEKDSDEAVTYSLGKFGQRALDFYSIHVTKESTHPVKPLAQIAGNRYASGPVGKALSDACMGTIASFLSKYQDIIIEHQKVVKGNQKRLESLRELAGKENLEYPSVTLPPQPHTKEGVDAYNEVIARVRMWVNLNLWQKLKLSRDDAKPLLRLKGFPSFPVVERRENEVDWWNTINEVKKLIDAKRDMGRVFWSGVTAEKRNTILEGYNYLPNENDHKKREGSLENPKKPAKRQFGDLLLYLEKKYAGDWGKVFDEAWERIDKKIAGLTSHIEREEARNAEDAQSKAVLTDWLRAKASFVLERLKEMDEKEFYACEIQLQKWYGDLRGNPFAVEAENRVVDISGFSIGSDGHSIQYRNLLAWKYLENGKREFYLLMNYGKKGRIRFTDGTDIKKSGKWQGLLYGGGKAKVIDLTFDPDDEQLIILPLAFGTRQGREFIWNDLLSLETGLIKLANGRVIEKTIYNKKIGRDEPALFVALTFERREVVDPSNIKPVNLIGVDRGENIPAVIALTDPEGCPLPEFKDSSGGPTDILRIGEGYKEKQRAIQAAKEVEQRRAGGYSRKFASKSRNLADDMVRNSARDLFYHAVTHDAVLVFENLSRGFGRQGKRTFMTERQYTKMEDWLTAKLAYEGLTSKTYLSKTLAQYTSKTCSNCGFTITTADYDGMLVRLKKTSDGWATTLNNKELKAEGQITYYNRYKRQTVEKELSAELDRLSEESGNNDISKWTKGRRDEALFLLKKRFSHRPVQEQFVCLDCGHEVHADEQAALNIARSWLFLNSNSTEFKSYKSGKQPFVGAWQAFYKRRLKEVWKPNA

SEQ ID NO: 2 - protein, 978 aa, unidentified
  REGION 1..978: note = Planctomycetes sp.
MQEIKRINKIRRRLVKDSNTKKAGKTGPMKTLLVRVMTPDLRERLENLRKKPENIPQPISNTSRANLNKLLTDYTEMKKAILHVYWEEFQKDPVGLMSRVAQPAPKNIDQRKLIPVKDGNERLTSSGFACSQCCQPLYVYKLEQVNDKGKPHTNYFGRCNVSEHERLILLSPHKPEANDELVTYSLGKFGQRALDFYSIHVTRESNHPVKPLEQIGGNSCASGPVGKALSDACMGAVASFLTKYQDIILEHQKVIKKNEKRLANLKDIASANGLAFPKITLPPQPHTKEGIEAYNNVVAQIVIWVNLNLWQKLKIGRDEAKPLQRLKGFPSFPLVERQANEVDWWDMVCNVKKLINEKKEDGKVFWQNLAGYKRQEALLPYLSSEEDRKKGKKFARYQFGDLLLHLEKKHGEDWGKVYDEAWERIDKKVEGLSKHIKLEEERRSEDAQSKAALTDWLRAKASFVIEGLKEADKDEFCRCELKLQKWYGDLRGKPFAIEAENSILDISGFSKQYNCAFIWQKDGVKKLNLYLIINYFKGGKLRFKKIKPEAFEANRFYTVINKKSGEIVPMEVNFNFDDPNLIILPLAFGKRQGREFIWNDLLSLETGSLKLANGRVIEKTLYNRRTRQDEPALFVALTFERREVLDSSNIKPMNLIGIDRGENIPAVIALTDPEGCPLSRFKDSLGNPTHILRIGESYKEKQRTIQAAKEVEQRRAGGYSRKYASKAKNLADDMVRNTARDLLYYAVTQDAMLIFENLSRGFGRQGKRTFMAERQYTRMEDWLTAKLAYEGLPSKTYLSKTLAQYTSKTCSNCGFTITSADYDRVLEKLKKTATGWMTTINGKELKVEGQITYYNRYKRQNVVKDLSVELDRLSEESVNNDISSWTKGRSGEALSLLKKRFSHRPVQEKFVCLNCGFETHADEQAALNIARSWLFLRSQEYKKYQTNKTTGNTDKRAFVETWQSFYRKKLKEVWKPAV

SEQ ID NO: 3 - protein, 855 aa, unidentified
  REGION 1..855: note = Candidatus Sungbacteria sp.
MDNANKPSTKSLVNTTRISDHFGVTPGQVTRVFSFGIIPTKRQYAIIERWFAAVEAARERLYGMLYAHFQENPPAYLKEKFSYETFFKGRPVLNGLRDIDPTIMTSAVFTALRHKAEGAMAAFHTNHRRLFEEARKKMREYAECLKANEALLRGAADIDWDKIVNALRTRLNTCLAPEYDAVIADFGALCAFRALIAETNALKGAYNHALNQMLPALVKVDEPEEAEESPRLRFFNGRINDLPKFPVAERETPPDTETIIRQLEDMARVIPDTAEILGYIHRIRHKAARRKPGSAVPLPQRVALYCAIRMERNPEEDPSTVAGHFLGEIDRVCEKRRQGLVRTPFDSQIRARYMDIISFRATLAHPDRWTEIQFLRSNAASRRVRAETISAPFEGFSWTSNRTNPAPQYGMALAKDANAPADAPELCICLSPSSAAFSVREKGGDLIYMRPTGGRRGKDNPGKEITWVPGSFDEYPASGVALKLRLYFGRSQARRMLTNKTWGLLSDNPRVFAANAELVGKKRNPQDRWKLFFHMVISGPPPVEYLDFSSDVRSRARTVIGINRGEVNPLAYAVVSVEDGQVLEEGLLGKKEYIDQLIETRRRISEYQSREQTPPRDLRQRVRHLQDTVLGSARAKIHSLIAFWKGILAIERLDDQFHGREQKIIPKKTYLANKTGFMNALSFSGAVRVDKKGNPWGGMIEIYPGGISRTCTQCGTVWLARRPKNPGHRDAMVVIPDIVDDAAATGFDNVDCDAGTVDYGELFTLSREWVRLTPRYSRVMRGTLGDLERAIRQGDDRKSRQMLELALEPQPQWGQFFCHRCGFNGQSDVLAATNLARRAISLIRRLPDTDTPPTP

SEQ ID NO: 4 - RNA, 108 nt, synthetic construct
  misc_feature 1..108: note = reference sgRNA
  source 1..108: mol_type = other RNA
acatctggcgcgtttattccattactttggagccagtcccagcgactatgtcgtatggacgaagcgcttatttatcggagagaaaccgataagtaaaacgcatcaaag

SEQ ID NO: 5 - RNA, 108 nt, synthetic construct
  misc_feature 1..108: note = reference sgRNA
  source 1..108: mol_type = other RNA
tactggcgcttttatctcattactttgagagccatcaccagcgactatgtcgtatgggtaaagcgcttatttatcggagagaaatccgataaataagaagcatcaaag

SEQ ID NO: 6 - RNA, 81 nt, unidentified
  misc_feature 1..81: note = Deltaproteobacteria sp.
  source 1..81: mol_type = other RNA
acatctggcgcgtttattccattactttggagccagtcccagcgactatgtcgtatggacgaagcgcttatttatcggaga

SEQ ID NO: 7 - RNA, 78 nt, unidentified
  misc_feature 1..78: note = Deltaproteobacteria sp.
  source 1..78: mol_type = other RNA
acatctggcgcgtttattccattactttggagccagtcccagcgactatgtcgtatggacgaagcgcttatttatcgg

SEQ ID NO: 8 - RNA, 80 nt, unidentified
  misc_feature 1..80: note = Planctomycetes sp.
  source 1..80: mol_type = other RNA
tactggcgcttttatctcattactttgagagccatcaccagcgactatgtcgtatgggtaaagcgcttatttatcggaga

SEQ ID NO: 9 - RNA, 77 nt, unidentified
  misc_feature 1..77: note = Planctomycetes sp.
  source 1..77: mol_type = other RNA
tactggcgcttttatctcattactttgagagccatcaccagcgactatgtcgtatgggtaaagcgcttatttatcgg

SEQ ID NO: 10 - RNA, 25 nt, unidentified
  misc_feature 1..25: note = Candidatus Sungbacteria sp.
  source 1..25: mol_type = other RNA
gtttacacactccctctcatagggt

SEQ ID NO: 11 - RNA, 25 nt, unidentified
  misc_feature 1..25: note = Candidatus Sungbacteria sp.
  source 1..25: mol_type = other RNA
gtttacacactccctctcatgaggt

SEQ ID NO: 12 - RNA, 25 nt, unidentified
  misc_feature 1..25: note = Candidatus Sungbacteria sp.
  source 1..25: mol_type = other RNA
ttttacataccccctctcatgggat

SEQ ID NO: 13 - RNA, 25 nt, unidentified
  misc_feature 1..25: note = Candidatus Sungbacteria sp.
  source 1..25: mol_type = other RNA
gtttacacactccctctcatggggg

SEQ ID NO: 14 - RNA, 20 nt, synthetic construct
  misc_feature 1..20: note = reference sgRNA
  source 1..20: mol_type = other RNA
ccagcgactatgtcgtatgg

SEQ ID NO: 15 - RNA, 39 nt, synthetic construct
  misc_feature 1..39: note = reference sgRNA
  source 1..39: mol_type = other RNA
gcgcttatttatcggagagaaatccgataaataagaagc

SEQ ID NO: 16 - RNA, 74 nt, synthetic construct
  misc_feature 1..74: note = reference sgRNA
  source 1..74: mol_type = other RNA
ggcgcttttatctcattactttgagagccatcaccagcgactatgtcgtatgggtaaagcgcttatttatcgga

SEQ ID NO: 17 - skipped

SEQ ID NO: 18 - RNA, 23 nt, unidentified
  misc_feature 1..23: note = Deltaproteobacteria sp.
  source 1..23: mol_type = other RNA
ccgataagtaaaacgcatcaaag

SEQ ID NO: 19 - RNA, 26 nt, unidentified
  misc_feature 1..26: note = Planctomycetes sp.
  source 1..26: mol_type = other RNA
tctccgataaataagaagcatcaaag

SEQ ID NO: 20 - RNA, 21 nt, synthetic construct
  misc_feature 1..21: note = scaffold stem loop
  source 1..21: mol_type = other RNA
ccagcgactatgtcgtagtgg

SEQ ID NO: 21 - skipped

SEQ ID NO: 22 - RNA, 19 nt, unidentified
  misc_feature 1..19: note = exogenous stem loop region
  source 1..19: mol_type = other RNA
acatgaggattacccatgt

SEQ ID NO: 23 - RNA, 18 nt, unidentified
  misc_feature 1..18: note = exogenous stem loop region
  source 1..18: mol_type = other RNA
tgcatgtctaagacagca

SEQ ID NO: 24 - RNA, 20 nt, unidentified
  misc_feature 1..20: note = exogenous stem loop region
  source 1..20: mol_type = other RNA
aatccattgcactccggatt

SEQ ID NO: 25 - RNA, 12 nt, unidentified
  misc_feature 1..12: note = exogenous stem loop region
  source 1..12: mol_type = other RNA
cctcttcggagg

SEQ ID NO: 26 - RNA, 21 nt, unidentified
  misc_feature 1..21: note = exogenous stem loop region
  source 1..21: mol_type = other RNA
aggagtttctatggaaaccct

SEQ ID NO: 27 - RNA, 30 nt, unidentified
  misc_feature 1..30: note = exogenous stem loop region
  source 1..30: mol_type = other RNA
aggtgggacgacctctcggtcgtcctatct

SEQ ID NO: 28 - RNA, 19 nt, unidentified
  misc_feature 1..19: note = exogenous stem loop region
  source 1..19: mol_type = other RNA
tgctcgctccgttcgagca

SEQ ID NO: 29 - RNA, 21 nt, unidentified
  misc_feature 1..21: note = exogenous stem loop region
  source 1..21: mol_type = other RNA
tgctcgacgcgtcctcgagca

SEQ ID NO: 30 - RNA, 22 nt, unidentified
  misc_feature 1..22: note = exogenous stem loop region
  source 1..22: mol_type = other RNA
tgctcgtttgcggctacgagca

SEQ ID NO: 31 - RNA, 17 nt, unidentified
  misc_feature 1..17: note = exogenous stem loop region
  source 1..17: mol_type = other RNA
agggagggagggagagg

SEQ ID NO: 32 - RNA, 19 nt, unidentified
  misc_feature 1..19: note = exogenous stem loop region
  source 1..19: mol_type = other RNA
ggttagggttagggttagg

SEQ ID NO: 33 - RNA, 25 nt, unidentified
  misc_feature 1..25: note = exogenous stem loop region
  source 1..25: mol_type = other RNA
ctgctcagtacgagaggaaccgcag

SEQ ID NO: 34 - RNA, 78 nt, unidentified
  misc_feature 1..78: note = exogenous stem loop region
  source 1..78: mol_type = other RNA
tacactgggatcgctgaattagagatcggcgtcctttcattctatatactttggagttttaaaatgtctctaagtaca

SEQ ID NO: 35 - skipped

SEQ ID NO: 36 - protein, 978 aa, synthetic construct
  REGION 1..978: note = CasX Variant
MQEIKRINKIRRRLVKDSNTKKAGKTGPMKTLLVRVMTPDLRERLENLRKKPENIPQPISNTSRANLNKLLTDYTEMKKAILHVYWEEFQKDPVGLMSRVAQPASKKIDQNKLKPEMDEKGNLTTAGFACSQCGQPLFVYKLEQVSEKGKAYTNYFGRCNVAEHEKLILLAQLKPEKDSDEAVTYSLGKFGQRALDFYSIHVTRESNHPVKPLEQIGGNSCASGPVGKALSDACMGAVASFLTKYQDIILEHQKVIKKNEKRLANLKDIASANGLAFPKITLPPQPHTKEGIEAYNNVVAQIVIWVNLNLWQKLKIGRDEAKPLQRLKGFPSFPLVERQANEVDWWDMVCNVKKLINEKKEDGKVFWQNLAGYKRQEALRPYLSSEEDRKKGKKFARYQFGDLLLHLEKKHGEDWGKVYDEAWERIDKKVEGLSKHIKLEEERRSEDAQSKAALTDWLRAKASFVIEGLKEADKDEFCRCELKLQKWYGDLRGKPFAIEAENSILDISGFSKQYNCAFIWQKDGVKKLNLYLIINYFKGGKLRFKKIKPEAFEANRFYTVINKKSGEIVPMEVNFNFDDPNLIILPLAFGKRQGREFIWNDLLSLETGSLKLANGRVIEKTLYNRRTRQDEPALFVALTFERREVLDSSNIKPMNLIGIDRGENIPAVIALTDPEGCPLSRFKDSLGNPTHILRIGESYKEKQRTIQAKKEVEQRRAGGYSRKYASKAKNLADDMVRNTARDLLYYAVTQDAMLIFENLSRGFGRQGKRTFMAERQYTRMEDWLTAKLAYEGLSKTYLSKTLAQYTSKTCSNCGFTITSADYDRVLEKLKKTATGWMTTINGKELKVEGQITYYNRYKRQNVVKDLSVELDRLSEESVNNDISSWTKGRSGEALSLLKKRFSHRPVQEKFVCLNCGFETHADEQAALNIARSWLFLRSQEYKKYQTNKTTGNTDKRAFVETWQSFYRKKLKEVWKPAV

SEQ ID NO: 37 - protein, 977 aa, synthetic construct
  REGION 1..977: note = CasX Variant
MQEIKRINKIRRRLVKDSNTKKAGKTGPMKTLLVRVMTPDLRERLENLRKKPENIPQPISNTSRANLNKLLTDYTEMKKAILHVYWEEFQKDPVGLMSRVAQPAPKNIDQRKLIPVKDGNERLTSSGFACSQCCQPLYVYKLEQVNDKGKPHTNYFGRCNVSEHERLILLSPHKPEANDELVTYSLGKFGQRALDFYSIHVTRESNHPVKPLEQIGGNSCASGPVGKALSDACMGAVASFLTKYQDIILEHQKVIKKNEKRLANLKDIASANGLAFPKITLPPQPHTKEGIEAYNNVVAQIVIWVNLNLWQKLKIGRDEAKPLQRLKGFPSFPLVERQANEVDWWDMVCNVKKLINEKKEDGKVFWQNLAGYKRQEALRPYLSSEEDRKKGKKFARYQFGDLLLHLEKKHGEDWGKVYDEAWERIDKKVEGLSKHIKLEEERRSEDAQSKAALTDWLRAKASFVIEGLKEADKDEFCRCELKLQKWYGDLRGKPFAIEAENSILDISGFSKQYNCAFIWQKDGVKKLNLYLIINYFKGGKLRFKKIKPEAFEANRFYTVINKKSGEIVPMEVNFNFDDPNLIILPLAFGKRQGREFIWNDLLSLETGSLKLANGRVIEKTLYNRRTRQDEPALFVALTFERREVLDSSNIKPMNLIGIDRGENIPAVIALTDPEGCPLSRFKDSLGNPTHILRIGESYKEKQRTIQAKKEVEQRRAGGYSRKYASKAKNLADDMVRNTARDLLYYAVTQDAMLIFENLSRGFGRQGKRTFMAERQYTRMEDWLTAKLAYEGLSKTYLSKTLAQYTSKTCSNCGFTITTADYDGMLVRLKKTSDGWATTLNNKELKAEGQITYYNRYKRQTVEKELSAELDRLSEESGNNDISKWTKGRRDEALFLLKKRFSHRPVQEQFVCLDCGHEVHADEQAALNIARSWLFLRSQEYKKYQTNKTTGNTDKRAFVETWQSFYRKKLKEVWKPAV

SEQ ID NO: 38 - protein, 985 aa, synthetic construct
  REGION 1..985: note = CasX Variant
MEKRINKIRKKLSADNATKPVSRSGPMKTLLVRVMTDDLKKRLEKRRKKPEVMPQVISNNAANNLRMLLDDYTKMKEAILQVYWQEFKDDHVGLMCKFAQPAPKNIDQRKLIPVKDGNERLTSSGFACSQCCQPLYVYKLEQVNDKGKPHTNYFGRCNVSEHERLILLSPHKPEANDELVTYSLGKFGQRALDFYSIHVTKESTHPVKPLAQIAGNRYASGPVGKALSDACMGTIASFLSKYQDIIIEHQKVVKGNQKRLESLRELAGKENLEYPSVTLPPQPHTKEGVDAYNEVIARVRMWVNLNLWQKLKLSRDDAKPLLRLKGFPSFPVVERRENEVDWWNTINEVKKLIDAKRDMGRVFWSGVTAEKRNTILEGYNYLPNENDHKKREGSLENPKKPAKRQFGDLLLYLEKKYAGDWGKVFDEAWERIDKKIAGLTSHIEREEARNAEDAQSKAVLTDWLRAKASFVLERLKEMDEKEFYACEIQLQKWYGDLRGNPFAVEAENRVVDISGFSIGSDGHSIQYRNLLAWKYLENGKREFYLLMNYGKKGRIRFTDGTDIKKSGKWQGLLYGGGKAKVIDLTFDPDDEQLIILPLAFGTRQGREFIWNDLLSLETGLIKLANGRVIEKTIYNKKIGRDEPALFVALTFERREVVDPSNIKPVNLIGVDRGENIPAVIALTDPEGCPLPEFKDSSGGPTDILRIGEGYKEKQRAIQAAKEVEQRRAGGYSRKFASKSRNLADDMVRNSARDLFYHAVTHDAVLVFENLSRGFGRQGKRTFMTERQYTKMEDWLTAKLAYEGLTSKTYLSKTLAQYTSKTCSNCGFTITTADYDGMLVRLKKTSDGWATTLNNKELKAEGQITYYNRYKRQTVEKELSAELDRLSEESGNNDISKWTKGRRDEALFLLKKRFSHRPVQEQFVCLDCGHEVHADEQAALNIARSWLFLNSNSTEFKSYKSGKQPFVGAWQAFYKRRLKEVWKPNA

SEQ ID NO: 39 - protein, 986 aa, synthetic construct
  REGION 1..986: note = CasX Variant
MEKRINKIRKKLSADNATKPVSRSGPMKTLLVRVMTDDLKKRLEKRRKKPEVMPQVISNNAANNLRMLLDDYTKMKEAILQVYWQEFKDDHVGLMCKFAQPASKKIDQNKLKPEMDEKGNLTTAGFACSQCGQPLFVYKLEQVSEKGKAYTNYFGRCNVAEHEKLILLAQLKPEKDSDEAVTYSLGKFGQRALDFYSIHVTKESTHPVKPLAQIAGNRYASGPVGKALSDACMGTIASFLSKYQDIIIEHQKVVKGNQKRLESLRELAGKENLEYPSVTLPPQPHTKEGVDAYNEVIARVRMWVNLNLWQKLKLSRDDAKPLLRLKGFPSFPVVERRENEVDWWNTINEVKKLIDAKRDMGRVFWSGVTAEKRNTILEGYNYLPNENDHKKREGSLENPKKPAKRQFGDLLLYLEKKYAGDWGKVFDEAWERIDKKIAGLTSHIEREEARNAEDAQSKAVLTDWLRAKASFVLERLKEMDEKEFYACEIQLQKWYGDLRGNPFAVEAENRVVDISGFSIGSDGHSIQYRNLLAWKYLENGKREFYLLMNYGKKGRIRFTDGTDIKKSGKWQGLLYGGGKAKVIDLTFDPDDEQLIILPLAFGTRQGREFIWNDLLSLETGLIKLANGRVIEKTIYNKKIGRDEPALFVALTFERREVVDPSNIKPVNLIGVDRGENIPAVIALTDPEGCPLPEFKDSSGGPTDILRIGEGYKEKQRAIQAAKEVEQRRAGGYSRKFASKSRNLADDMVRNSARDLFYHAVTHDAVLVFENLSRGFGRQGKRTFMTERQYTKMEDWLTAKLAYEGLTSKTYLSKTLAQYTSKTCSNCGFTITSADYDRVLEKLKKTATGWMTTINGKELKVEGQITYYNRYKRQNVVKDLSVELDRLSEESVNNDISSWTKGRSGEALSLLKKRFSHRPVQEKFVCLNCGFETHADEQAALNIARSWLFLNSNSTEFKSYKSGKQPFVGAWQAFYKRRLKEVWKPNA

SEQ ID NO: 40 - protein, 921 aa, synthetic construct
  REGION 1..921: note = CasX Variant
MQEIKRINKIRRRLVKDSNTKKAGKTGPMKTLLVRVMTPDLRERLENLRKKPENIPQPISNTSRANLNKLLTDYTEMKKAILHVYWEEFQKDPVGLMSRVAQPAPKNIDQRKLIPVKDGNERLTSSGFACSQCCQPLYVYKLEQVNDKGKPHTNYFGRCNVSEHERLILLSPHKPEANDELVTYSLGKFGQRALDFYSIHVTRESNHPVKPLEQIGGNSCASGPVGKALSDACMGAVASFLTKYQDIILEHQKVIKKNEKRLANLKDIASANGLAFPKITLPPQPHTKEGIEAYNNVVAQIVIWVNLNLWQKLKIGRDEAKPLQRLKGFPSFPLVERQANEVDWWDMVCNVKKLINEKKEDGKVFWQNLAGYKRQEALRPYLSSEEDRKKGKKFARYQFGDLLLHLEKKHGEDWGKVYDEAWERIDKKVEGLSKHIKLEEERRSEDAQSKAALTDWLRAKASFVIEGLKEADKDEFCRCELKLQKWYGDLRGKPFAIEAENSILDISGFSKQYNCAFIWQKDGVKKLNLYLIINYFKGGKLRFKKIKPEAFEANRFYTVINKKSGEIVPMEVNFNFDDPNLIILPLAFGKRQGREFIWNDLLSLETGSLKLANGRVIEKTLYNRRTRQDEPALFVALTFERREVLDSSNIKPVNLIGVDRGENIPAVIALTDPEGCPLPEFKDSSGGPTDILRIGEGYKEKQRAIQAAKEVEQRRAGGYSRKFASKSRNLADDMVRNSARDLFYHAVTHDAVLVFENLSRGFGRQGKRTFMTERQYTKMEDWLTAKLAYEGLTSKTYLSKTLAQYTSKTCSNCGFTITSADYDRVLEKLKKTATGWMTTINGKELKVEGQITYYNRYKRQNVVKDLSVELDRLSEESVNNDISSWTKGRSGEALSLLKKRFSHRPVQEKFVCLNCGFETHA

SEQ ID NO: 41 - protein, 920 aa, synthetic construct
  REGION 1..920: note = CasX Variant
MQEIKRINKIRRRLVKDSNTKKAGKTGPMKTLLVRVMTPDLRERLENLRKKPENIPQPISNTSRANLNKLLTDYTEMKKAILHVYWEEFQKDPVGLMSRVAQPAPKNIDQRKLIPVKDGNERLTSSGFACSQCCQPLYVYKLEQVNDKGKPHTNYFGRCNVSEHERLILLSPHKPEANDELVTYSLGKFGQRALDFYSIHVTRESNHPVKPLEQIGGNSCASGPVGKALSDACMGAVASFLTKYQDIILEHQKVIKKNEKRLANLKDIASANGLAFPKITLPPQPHTKEGIEAYNNVVAQIVIWVNLNLWQKLKIGRDEAKPLQRLKGFPSFPLVERQANEVDWWDMVCNVKKLINEKKEDGKVFWQNLAGYKRQEALRPYLSSEEDRKKGKKFARYQFGDLLLHLEKKHGEDWGKVYDEAWERIDKKVEGLSKHIKLEEERRSEDAQSKAALTDWLRAKASFVIEGLKEADKDEFCRCELKLQKWYGDLRGKPFAIEAENSILDISGFSKQYNCAFIWQKDGVKKLNLYLIINYFKGGKLRFKKIKPEAFEANRFYTVINKKSGEIVPMEVNFNFDDPNLIILPLAFGKRQGREFIWNDLLSLETGSLKLANGRVIEKTLYNRRTRQDEPALFVALTFERREVLDSSNIKPMNLIGIDRGENIPAVIALTDPEGCPLSRFKDSLGNPTHILRIGESYKEKQRTIQAKKEVEQRRAGGYSRKYASKAKNLADDMVRNTARDLLYYAVTQDAMLIFENLSRGFGRQGKRTFMAERQYTRMEDWLTAKLAYEGLSKTYLSKTLAQYTSKTCSNCGFTITSADYDRVLEKLKKTATGWMTTINGKELKVEGQITYYNRYKRQNVVKDLSVELDRLSEESVNNDISSWTKGRSGEALSLLKKRFSHRPVQEKFVCLNCGFETHA

SEQ ID NO: 42 - protein, 977 aa, synthetic construct
  REGION 1..977: note = CasX Variant
MQEIKRINKIRRRLVKDSNTKKAGKTGPMKTLLVRVMTPDLRERLENLRKKPENIPQPISNNAANNLRMLLDDYTKMKEAILQVYWQEFKDDHVGLMCKFAQPAPKNIDQRKLIPVKDGNERLTSSGFACSQCCQPLYVYKLEQVNDKGKPHTNYFGRCNVSEHERLILLSPHKPEANDELVTYSLGKFGQRALDFYSIHVTKESTHPVKPLAQIAGNRYASGPVGKALSDACMGTIASFLSKYQDIIIEHQKVVKGNQKRLESLRELAGKENLEYPSVTLPPQPHTKEGVDAYNEVIARVRMWVNLNLWQKLKLSRDDAKPLLRLKGFPSFPLVERQANEVDWWDMVCNVKKLINEKKEDGKVFWQNLAGYKRQEALRPYLSSEEDRKKGKKFARYQFGDLLLHLEKKHGEDWGKVYDEAWERIDKKVEGLSKHIKLEEERRSEDAQSKAALTDWLRAKASFVIEGLKEADKDEFCRCELKLQKWYGDLRGKPFAIEAENSILDISGFSKQYNCAFIWQKDGVKKLNLYLIINYFKGGKLRFKKIKPEAFEANRFYTVINKKSGEIVPMEVNFNFDDPNLIILPLAFGKRQGREFIWNDLLSLETGSLKLANGRVIEKTLYNRRTRQDEPALFVALTFERREVLDSSNIKPMNLIGIDRGENIPAVIALTDPEGCPLSRFKDSLGNPTHILRIGESYKEKQRTIQAKKEVEQRRAGGYSRKYASKAKNLADDMVRNTARDLLYYAVTQDAMLIFENLSRGFGRQGKRTFMAERQYTRMEDWLTAKLAYEGLSKTYLSKTLAQYTSKTCSNCGFTITSADYDRVLEKLKKTATGWMTTINGKELKVEGQITYYNRYKRQNVVKDLSVELDRLSEESVNNDISSWTKGRSGEALSLLKKRFSHRPVQEKFVCLNCGFETHADEQAALNIARSWLFLRSQEYKKYQTNKTTGNTDKRAFVETWQSFYRKKLKEVWKPAV

SEQ ID NO: 43 - protein, 986 aa, synthetic construct
  REGION 1..986: note = CasX Variant
MQEIKRINKIRRRLVKDSNTKKAGKTGPMKTLLVRVMTPDLRERLENLRKKPENIPQPISNTSRANLNKLLTDYTEMKKAILHVYWEEFQKDPVGLMSRVAQPAPKNIDQRKLIPVKDGNERLTSSGFACSQCCQPLYVYKLEQVNDKGKPHTNYFGRCNVSEHERLILLSPHKPEANDELVTYSLGKFGQRALDFYSIHVTRESNHPVKPLEQIGGNSCASGPVGKALSDACMGAVASFLTKYQDIILEHQKVIKKNEKRLANLKDIASANGLAFPKITLPPQPHTKEGIEAYNNVVAQIVIWVNLNLWQKLKIGRDEAKPLQRLKGFPSFPVVERRENEVDWWNTINEVKKLIDAKRDMGRVFWSGVTAEKRNTILEGYNYLPNENDHKKREGSLENPKKPAKRQFGDLLLYLEKKYAGDWGKVFDEAWERIDKKIAGLTSHIEREEARNAEDAQSKAVLTDWLRAKASFVLERLKEMDEKEFYACEIQLQKWYGDLRGNPFAVEAENSILDISGFSKQYNCAFIWQKDGVKKLNLYLIINYFKGGKLRFKKIKPEAFEANRFYTVINKKSGEIVPMEVNFNFDDPNLIILPLAFGKRQGREFIWNDLLSLETGSLKLANGRVIEKTLYNRRTRQDEPALFVALTFERREVLDSSNIKPMNLIGIDRGENIPAVIALTDPEGCPLSRFKDSLGNPTHILRIGESYKEKQRTIQAKKEVEQRRAGGYSRKYASKAKNLADDMVRNTARDLLYYAVTQDAMLIFENLSRGFGRQGKRTFMAERQYTRMEDWLTAKLAYEGLSKTYLSKTLAQYTSKTCSNCGFTITSADYDRVLEKLKKTATGWMTTINGKELKVEGQITYYNRYKRQNVVKDLSVELDRLSEESVNNDISSWTKGRSGEALSLLKKRFSHRPVQEKFVCLNCGFETHADEQAALNIARSWLFLRSQEYKKYQTNKTTGNTDKRAFVETWQSFYRKKLKEVWKPAV

SEQ ID NO: 44 - protein, 925 aa, synthetic construct
  REGION 1..925: note = CasX Variant
MISNTSRANLNKLLTDYTEMKKAILHVYWEEFQKDPVGLMSRVAQPAPKNIDQRKLIPVKDGNERLTSSGFACSQCCQPLYVYKLEQVNDKGKPHTNYFGRCNVSEHERLILLSPHKPEANDELVTYSLGKFGQRALDFYSIHVTRESNHPVKPLEQIGGNSCASGPVGKALSDACMGAVASFLTKYQDIILEHQKVIKKNEKRLANLKDIASANGLAFPKITLPPQPHTKEGIEAYNNVVAQIVIWVNLNLWQKLKIGRDEAKPLQRLKGFPSFPLVERQANEVDWWDMVCNVKKLINEKKEDGKVFWQNLAGYKRQEALRPYLSSEEDRKKGKKFARYQFGDLLLHLEKKHGEDWGKVYDEAWERIDKKVEGLSKHIKLEEERRSEDAQSKAALTDWLRAKASFVIEGLKEADKDEFCRCELKLQKWYGDLRGKPFAIEAENRVVDISGFSIGSDGHSIQYRNLLAWKYLENGKREFYLLMNYGKKGRIRFTDGTDIKKSGKWQGLLYGGGKAKVIDLTFDPDDEQLIILPLAFGTRQGREFIWNDLLSLETGLIKLANGRVIEKTIYNKKIGRDEPALFVALTFERREVVDPSNIKPMNLIGIDRGENIPAVIALTDPEGCPLSRFKDSLGNPTHILRIGESYKEKQRTIQAKKEVEQRRAGGYSRKYASKAKNLADDMVRNTARDLLYYAVTQDAMLIFENLSRGFGRQGKRTFMAERQYTRMEDWLTAKLAYEGLSKTYLSKTLAQYTSKTCSNCGFTITSADYDRVLEKLKKTATGWMTTINGKELKVEGQITYYNRYKRQNVVKDLSVELDRLSEESVNNDISSWTKGRSGEALSLLKKRFSHRPVQEKFVCLNCGFETHADEQAALNIARSWLFLRSQEYKKYQTNKTTGNTDKRAFVETWQSFYRKKLKEVWKPAV

SEQ ID NO: 45 - protein, 975 aa, synthetic construct
  REGION 1..975: note = CasX Variant
MEKRINKIRKKLSADNATKPVSRSGPMKTLLVRVMTDDLKKRLEKRRKKPEVMPQVISNTSRANLNKLLTDYTEMKKAILHVYWEEFQKDPVGLMSRVAQPAPKNIDQRKLIPVKDGNERLTSSGFACSQCCQPLYVYKLEQVNDKGKPHTNYFGRCNVSEHERLILLSPHKPEANDELVTYSLGKFGQRALDFYSIHVTRESNHPVKPLEQIGGNSCASGPVGKALSDACMGAVASFLTKYQDIILEHQKVIKKNEKRLANLKDIASANGLAFPKITLPPQPHTKEGIEAYNNVVAQIVIWVNLNLWQKLKIGRDEAKPLQRLKGFPSFPLVERQANEVDWWDMVCNVKKLINEKKEDGKVFWQNLAGYKRQEALRPYLSSEEDRKKGKKFARYQFGDLLLHLEKKHGEDWGKVYDEAWERIDKKVEGLSKHIKLEEERRSEDAQSKAALTDWLRAKASFVIEGLKEADKDEFCRCELKLQKWYGDLRGKPFAIEAENSILDISGFSKQYNCAFIWQKDGVKKLNLYLIINYFKGGKLRFKKIKPEAFEANRFYTVINKKSGEIVPMEVNFNFDDPNLIILPLAFGKRQGREFIWNDLLSLETGSLKLANGRVIEKTLYNRRTRQDEPALFVALTFERREVLDSSNIKPMNLIGIDRGENIPAVIALTDPEGCPLSRFKDSLGNPTHILRIGESYKEKQRTIQAKKEVEQRRAGGYSRKYASKAKNLADDMVRNTARDLLYYAVTQDAMLIFENLSRGFGRQGKRTFMAERQYTRMEDWLTAKLAYEGLSKTYLSKTLAQYTSKTCSNCGFTITSADYDRVLEKLKKTATGWMTTINGKELKVEGQITYYNRYKRQNVVKDLSVELDRLSEESVNNDISSWTKGRSGEALSLLKKRFSHRPVQEKFVCLNCGFETHADEQAALNIARSWLFLRSQEYKKYQTNKTTGNTDKRAFVETWQSFYRKKLKEVWKPAV

SEQ ID NO: 46 - protein, 982 aa, synthetic construct
  REGION 1..982: note = CasX Variant
MQEIKRINKIRRRLVKDSNTKKAGKTGPMKTLLVRVMTPDLRERLENLRKKPENIPQPISNTSRANLNKLLTDYTEMKKAILHVYWEEFQKDPVGLMSRVAQPAPKNIDQRKLIPVKDGNERLTSSGFACSQCCQPLYVYKLEQVNDKGKPHTNYFGRCNVSEHERLILLSPHKPEANDELVTYSLGKFGQRALDFYSIHVTRESNHPVKPLEQIGGNSCASGPVGKALSDACMGAVASFLTKYQDIILEHQKVIKKNEKRLANLKDIASANGLAFPKITLPPQPHTKEGIEAYNNVVAQIVIWVNLNLWQKLKIGRDEAKPLQRLKGFPSFPLVERQANEVDWWDMVCNVKKLINEKKEDGKVFWQNLAGYKRQEALRPYLSSEEDRKKGKKFARYQFGDLLLHLEKKHGEDWGKVYDEAWERIDKKVEGLSKHIKLEEERRSEDAQSKAALTDWLRAKASFVIEGLKEADKDEFCRCELKLQKWYGDLRGKPFAIEAENRVVDISGFSIGSDGHSIQYRNLLAWKYLENGKREFYLLMNYGKKGRIRFTDGTDIKKSGKWQGLLYGGGKAKVIDLTFDPDDEQLIILPLAFGTRQGREFIWNDLLSLETGLIKLANGRVIEKTIYNKKIGRDEPALFVALTFERREVVDPSNIKPMNLIGIDRGENIPAVIALTDPEGCPLSRFKDSLGNPTHILRIGESYKEKQRTIQAKKEVEQRRAGGYSRKYASKAKNLADDMVRNTARDLLYYAVTQDAMLIFENLSRGFGRQGKRTFMAERQYTRMEDWLTAKLAYEGLSKTYLSKTLAQYTSKTCSNCGFTITSADYDRVLEKLKKTATGWMTTINGKELKVEGQITYYNRYKRQNVVKDLSVELDRLSEESVNNDISSWTKGRSGEALSLLKKRFSHRPVQEKFVCLNCGFETHADEQAALNIARSWLFLRSQEYKKYQTNKTTGNTDKRAFVETWQSFYRKKLKEVWKPAV

SEQ ID NO: 47 - protein, 977 aa, synthetic construct
  REGION 1..977: note = CasX Variant
MQEIKRINKIRRRLVKDSNTKKAGKTGPMKTLLVRVMTPDLRERLENLRKKPENIPQPISNTSRANLNKLLTDYTEMKKAILHVYWEEFQKDPVGLMSRVAQPAPKNIDQRKLIPVKDGNERLTSSGFACSQCCQPLYVYKLEQVNDKGKPHTNYFGRCNVSEHERLILLSPHKPEANDELVTYSLGKFGQRALDFYSIHVTRESNHPVKPLEQIGGNSCASGPVGKALSDACMGAVASFLTKYQDIILEHQKVIKKNEKRLANLKDIASANGLAFPKITLPPQPHTKEGIEAYNNVVAQIVIWVNLNLWQKLKIGRDEAKPLQRLKGFPSFPLVERQANEVDWWDMVCNVKKLINEKKEDGKVFWQNLAGYKRQEALRPYLSSEEDRKKGKKFARYQFGDLLLHLEKKHGEDWGKVYDEAWERIDKKVEGLSKHIKLEEERRSEDAQSKAALTDWLRAKASFVIEGLKEADKDEFKRCELKLQKWYGDLRGKPFAIEAENSILDISGFSKQYNCAFIWQKDGVKKLNLYLIINYFKGGKLRFKKIKPEAFEANRFYTVINKKSGEIVPMEVNFNFDDPNLIILPLAFGKRQGREFIWNDLLSLETGSLKLANGRVIEKPLYNRRTRQDEPALFVALTFERREVLDSSNIKPMNLIGIDRGENIPAVIALTDPEGCPLSRFKDSLGNPTHILRIGESYKEKQRTIQAKKEVEQRRAGGYSRKYASKAKNLADDMVRNTARDLLYYAVTQDAMLIFENLSRGFGRQGKRTFMAERQYTRMEDWLTAKLAYEGLSKTYLSKTLAQYTSKTCSNCGFTITSADYDRVLEKLKKTATGWMTTINGKELKVEGQITYYNRYKRQNVVKDLSVELDRLSEESVNNDISSWTKGRSGEALSLLKKRFSHRPVQEKFVCLNCGFETHADEQAALNIARSWLFLRSQEYKKYQTNKTTGNTDKRAFVETWQSFYRKKLKEVWKPAV

SEQ ID NO: 48 - protein, 977 aa, synthetic construct
  REGION 1..977: note = CasX Variant
MQEIKRINKIRRRLVKDSNTKKAGKTGPMKTLLVRVMTPDLRERLENLRKKPENIPQPISNTSRANLNKLLTDYTEMKKAILHVYWEEFQKDPVGLMSRVAQPAPKNIDQRKLIPVKDGNERLTSSGFACSQCCQPLYVYKLEQVNDKGKPHTNYFGRCNVSEHERLILLSPHKPEANDELVTYSLGKFGQRALDFYSIHVTRESNHPVKPLEQIGGNSCASGPVGKALSDACMGAVASFLTKYQDIILEHQKVIKKNEKRLANLKDIASANGLAFPKITLPPQPHTKEGIEAYNNVVAQIVIWVNLNLWQKLKIGRDEAKPLQRLKGFPSFPLVERQANEVDWWDMVCNVKKLINEKKEDGKVFWQNLAGYKRQEALLPYLSSEEDRKKGKKFARYQFGDLLLHLEKKHGEDWGKVYDEAWERIDKKVEGLSKHIKLEEERRSEDAQSKAALTDWLRAKASFVIEGLKEADKDEFCRCELKLQKWYGDLRGKPFAIEAENSILDISGFSKQYNCAFIWQKDGVKKLNLYLIINYFKGGKLRFKKIKPEAFEANRFYTVINKKSGEIVPMEVNFNFDDPNLIILPLAFGKRQGREFIWNDLLSLETGSLKLANGRVIEKTLYNRRTRQDEPALFVALTFERREVLDSSNIKPMNLIGIDRGENIPAVIALTDPEGCPLSRFKDSLGNPTHILRIGESYKEKQRTIQAAKEVEQRRAGGYSRKYASKAKNLADDMVRNTARDLLYYAVTQDAMLIFENLSRGFGRQGKRTFAAERQYTRMEDWLTAKLAYEGLPSKTYLSKTLAQYTSKTCSNCGFTITSADYDRVLEKLKKTATGWMTTINGKELKVEGQITYYNRYKRQNVVKDLSVELDRLSEESVNNDISSWTKGRSGEALSLLKKRFSHRPVQEKFVCLNCGFETHADEQAALNIARSWLFLRSQEYKKYQTNKTTGNTDKRAFVETWQSFYRKKLKEVWKPA

SEQ ID NO: 49 - protein, 977 aa, synthetic construct
  REGION 1..977: note = CasX Variant
MQEIKRINKIRRRLVKDSNTKKAGKTGPMKTLLVRVMTPDLRERLENLRKKPENIPQPISNTSRANLNKLLTDYTEMKKAILHVYWEEFQKDPVGLMSRVAQPAPKNIDQRKLIPVKDGNERLTSSGFACSQCCQPLYVYKLEQVNDKGKPHTNYFGRCNVSEHERLILLSPHKPEANDELVTYSLGKFGQRALDFYSIHVTRESNHPVKPLEQIGGNSCASGPVGKALSDACMGAVASFLTKYQDIILEHQKVIKKNEKRLANLKDIASANGLAFPKITLPPQPHTKEGIEAYNNVVAQIVIWVNLNLWQKLKIGRDEAKPLQRLKGFPSFPLVERQANEVDWWDMVCNVKKLINEKKEDGKVFWQNLAGYKRQEALRPYLSSEEDRKKGKKFARYQFGDLLLHLEKKHGEDWGKVYDEAWERIDKKVEGLSKHIKLEEERRSEDAQSKAALTDWLRAKASFVIEGLKEADKDEFCRCELKLQKWYGDLRGKPFAIEAENSILDISGFSKQYNCAFIWQKDGVKKLNLYLIINYFKGGKLRFKKIKPEAFEANRFYTVINKKSGEIVPMEVNFNFDDPNLIILPLAFGKRQGREFIWNDLLSLETGSLKLANGRVIEKTLYNRRTRQDEPALFVALTFERREVLDSSNIKPMNLIGIDRGENIPAVIALTDPEGCPLSRFKDSLGNPTHILRIGESYKEKQRTIQAKKEVEQRRAGGYSRKYASKAKNLANDMVRNTARDLLYYAVTQDAMLIFENLSRGFGRQGKRTFMAERQYTRMEDWLTAKLAYEGLSKTYLSKTLAQYTSKTCSNCGFTITSADYDRVLEKLKKTATGWMTTINGKELKVEGQITYYNRYKRQNVVKDLSVELDRLSEESVNNDISSWTKGRSGEALSLLKKRFSHRPVQEKFVCLNCGFETHADEQAALNIARSWLFLRSQEYKKYQTNKTTGNTDKRAFVETWQSFYRKKLKEVWKPAV

SEQ ID NO: 50 - protein, 978 aa, synthetic construct
  REGION 1..978: note = CasX Variant
MQEIKRINKIRRRLVKDSNTKKAGKTGPMKTLLVRVMTPDLRERLENLRKKPENIPQPISNTSRANLNKLLTDYTEMKKAILHVYWEEFQKDPVGLMSRVAQPAPKNIDQRKLIPVKDGNERLTSSGFACSQCCQPLYVYKLEQVNDKGKPHTNYFGRCNVSEHERLILLSPHKPEANDELVTYSLGKFGQRALDFYSIHVTRESNHPVKPLEQIGGNSCASGPVGKALSDACMGAVASFLTKYQDIILEHQKVIKKNEKRLANLKDIASANGLAFPKITLPPQPHTKEGIEAYNNVVAQIVIWVNLNLWQKLKIGRDEAKPLQRLKGFPSFPLVERQANEVDWWDMVCNVKKLINEKKEDGKVFWQNLAGYKRQEALLPYLSSEEDRKKGKKFARYQFGDLLLHLEKKHGEDWGKVYDEAWERIDKKVEGLSKHIKLEEERRSEDAQSKAALTDWLRAKASFVIEGLKEADKDEFCRCELKLQKWYGDLRGKPFAIEAENSILDISGFSKQYNCAFIWQKDGVKKLNLYLIINYFKGGKLRFKKIKPEAFEANRFYTVINKKSGEIVPMEVNFNFDDPNLIILPLAFGKRQGREFIWNDLLSLETGSLKLANGRVIEKTLYNRRTRQDEPALFVALTFERREVLDSSNIKPMNLIGIDRGENIPAVIALTDPEGCPLSRFKDSLGNPTHILRIGESYKEKQRTIQAAKEVEQRRAGGYSRKYASKAKNLADDMVRNTARDLLYYAVTQDAMLIFENLSRGFGRQGKRTFMAERQYTRMEDQLTAKLAYEGLPSKTYLSKTLAQYTSKTCSNCGFTITSADYDRVLEKLKKTATGWMTTINGKELKVEGQITYYNRYKRQNVVKDLSVELDRLSEESVNNDISSWTKGRSGEALSLLKKRFSHRPVQEKFVCLNCGFETHADEQAALNIARSWLFLRSQEYKKYQTNKTTGNTDKRAFVETWQSFYRKKLKEVWKPAV

SEQ ID NO: 51 - protein, 978 aa, synthetic construct
  REGION 1..978: note = CasX Variant
MQEIKRINKIRRRLVKDSNTKKAGKTGPMKTLLVRVMTPDLRERLENLRKKPENIPQPISNTSRANLNKLLTDYTEMKKAILHVYWEEFQKDPVGLMSRVAQPAPKNIDQRKLIPVKDGNERLTSSGFACSQCCQPLYVYKLEQVNDKGKPHTNYFGRCNVSEHERLILLSPHKPEANDELVTYSLGKFGQRALDFYSIHVTRESNHPVKPLEQIGGNSCASGPVGKALSDACMGAVASFLTKYQDIILEHQKVIKKNEKRLANLKDIASANGLAFPKITLPPQPHTKEGIEAYNNVVAQIVIWVNLNLWQKLKIGRDEAKPLQRLKGFPSFPLVERQANEVDWWDMVCNVKKLINEKKEDGKVFWQNLAGYKRQEALLPYLSSEEDRKKGKKFARYQFGDLLLHLEKKHGEDWGKVYDEAWERIDKKVEGLSKHIKLEEERRSEDAQSKAALTDWLRAKASFVIEGLKEADKDEFCRCELKLQKWYGDLRGKPFAIEAENSILDISGFSKQYNCAFIWQKDGVKKLNLYLIINYFKGGKLRFKKIKPEAFEANRFYTVINKKSGEIVPMEVNFNFDDPNLIILPLAFGKRQGREFIWNDLLSLETGSLKLANGRVIEKTLYNRRTRQDEPALFVALTFERREVLDSSNIKPMNLIGIDRGENIPAVIALTDPEGCPLSRFKDSLGNPTHILRIGESYKEKQRTIQAAKEVEQRRAGGYSRKYASKAKNLADDMVRNTARDLLYYAVTQDAMLIFENLSRGFGRQGKRTFQAERQYTRMEDWLTAKLAYEGLPSKTYLSKTLAQYTSKTCSNCGFTITSADYDRVLEKLKKTATGWMTTINGKELKVEGQITYYNRYKRQNVVKDLSVELDRLSEESVNNDISSWTKGRSGEALSLLKKRFSHRPVQEKFVCLNCGFETHADEQAALNIARSWLFLRSQEYKKYQTNKTTGNTDKRAFVETWQSFYRKKLKEVWKPAV

SEQ ID NO: 52 - protein, 978 aa, synthetic construct
  REGION 1..978: note = CasX Variant
MQEIKRINKIRRRLVKDSNTKKAGKTGPMKTLLVRVMTPDLRERLENLRKKPENIPQPISNTSRANLNKLLTDYTEMKKAILHVYWEEFQKDPVGLMSRVAQPAPKNIDQRKLIPVKDGNERLTSSGFACSQCCQPLYVYKLEQVNDKGKPHTNYFGRCNVSEHERLILLSPHKPEANDELVTYSLGKFGQRALDFYSIHVTRESNHPVKPLEQIGGNSCASGPVGKALSDACMGAVASFLTKYQDIILEHQKVIKKNEKRLANLKDIASANGLAFPKITLPPQPHTKEGIEAYNNVVAQIVIWVNLNLWQKLKIGRDEAKPLQRLKGFPSFPLVERQANEVDWWDMVCNVKKLINEKKEDGKVFWQNLAGYKRQEALLPYLSSEEDRKKGKKFARYQFGDLLLHLEKKHGEDWGKVYDEAWERIDKKVEGLSKHIKLEEERRSEDAQSKAALTDWLIAKASFVIEGLKEADKDEFCRCELKLQKWYGDLRGKPFAIEAENSILDISGFSKQYNCAFIWQKDGVKKLNLYLIINYFKGGKLRFKKIKPEAFEANRFYTVINKKSGEIVPMEVNFNFDDPNLIILPLAFGKRQGREFIWNDLLSLETGSLKLANGRVIEKTLYNRRTRQDEPALFVALTFERREVLDSSNIKPMNLIGIDRGENIPAVIALTDPEGCPLSRFKDSLGNPTHILRIGESYKEKQRTIQAAKEVEQRRAGGYSRKYASKAKNLADDMVRNTVRDLLYYAVTQDAMLIFENLSRGFGRQGKRTFMAERQYTRMEDWLTAKLAYEGLPSKTYLSKTLAQYTSKTCSNCGFTITSADYDRVLEKLKKTATGWMTTINGKELKVEGQITYYNRYKRQNVVKDLSVELDRLSEESVNNDISSWTKGRSGEALSLLKKRFSHRPVQEKFVCLNCGFETHADEQAALNIARSWLFLRSQEYKKYQTNKTTGNTDKRAFVETWQSFYRKKLKEVWKPAV

SEQ ID NO: 53 - protein, 977 aa, synthetic construct
  REGION 1..977: note = CasX Variant
MQEIKRINKIRRRLVKDSNTKKAGKTGPMKTLLVRVMTPDLRERLENLRKKPENIPQPISNTSRANLNKLLTDYTEMKKAILHVYWEEFQKDPVGLMSRVAQPAPKNIDQRKLIPVKDGNERLTSSGFACSQCCQPLYVYKLEQVNDKGKPHTNYFGRCNVSEHERLILLSPHKPEANDELVTYSLGKFGQRALDFYSIHVTRESNHPVKPLEQIGGNSCASGPVGKALSDACMGAVASFLTKYQDIILEHQKVIKKNEKRLANLKDIASANGLAFPKITLPPQPHTKEGIEAYNNVVAQIVIWVNLNLWQKLKIGRDEAKPLQRLKGFPSFPLVERQANEVDWWDMVCNVKKLINEKKEDGKVFWQNLAGYKRQEALRPYLSSEEDRKKGKKFARYQFGDLLLHLEKKHGEDWGKVYDEAWERIDKKVEGLSKHIKLEEERRSEDAQSKAALTDWLRAKASFVIEGLKEADKDEFCRCELKLQKWYGDLRGKPFAIEAENSILDISGFSKQYNCAFIWQKDGVKKLNLYLIINYFKGGKLRFKKIKPEAFEANRFYTVINKKSGEIVPMEVNFNFDDPNLIILPLAFGKRQGREFIWNDLLSLETGSLKLANGRVIEKTLYNRRTRQDEPALFVALTFERREVLDSSNIKPMNLIGIDRGENIPAVIALTDPEGCPLSRFKDSLGNPTHILRIGESYKEKQRTIQAKKEVEQRRAGGYSRKYASKAKNLADDMVRNTARDLLYYAVTQDAMLIFENLSRGFGRQGKRTFNAERQYTRMEDWLTAKLAYEGLSKTYLSKTLAQYTSKTCSNCGFTITSADYDRVLEKLKKTATGWMTTINGKELKVEGQITYYNRYKRQNVVKDLSVELDRLSEESVNNDISSWTKGRSGEALSLLKKRFSHRPVQEKFVCLNCGFETHADEQAALNIARSWLFLRSQEYKKYQTNKTTGNTDKRAFVETWQSFYRKKLKEVWKPAV

SEQ ID NO: 54 - protein, 977 aa, synthetic construct
  REGION 1..977: note = CasX Variant
MQEIKRINKIRRRLVKDSNTKKAGKTGPMKTLLVRVMTPDLRERLENLRKKPENIPQPISNTSRANLNKLLTDYTEMKKAILHVYWEEFQKDPVGLMSRVAQPAPKNIDQRKLIPVKDGNERLTSSGFACSQCCQPLYVYKLEQVNDKGKPHTNYFGRCNVSEHERLILLSPHKPEANDELVTYSLGKFGQRALDFYSIHVTRESNHPVKPLEQIGGNSCASGPVGKALSDACMGAVASFLTKYQDIILEHQKVIKKNEKRLANLKDIASANGLAFPKITLPPQPHTKEGIEAYNNVVAQIVIWVNLNLWQKLKIGRDEAKPLQRLKGFPSFPLVERQANEVDWWDMVCNVKKLINEKKEDGKVFWQNLAGYKRQEALRPYLSSEEDRKKGKKFARYQFGDLLLHLEKKHGEDWGKVYDEAWERIDKKVEGLSKHIKLEEERRSEDAQSKAALTDWLRAKASFVIEGLKEADKDEFCRCELKLQKWYGDLRGKPFAIEAENSILDISGFSKQYNCAFIWQKDGVKKLNLYLIINYFKGGKLRFKKIKPEAFEANRFYTVINKKSGEIVPMEVNFNFDDPNLIILPLAFGKRQGREFIWNDLLSLETGSLKLANGRVIEKTLYNRRTRQDEPALFVALTFERREVLDSSNIKPMNLIGIDRGENIPAVIALTDPEGCPLSRFKDSLGNPTHILRIGESYKEKQRTIQAKKEVEQRRAGGYSRKYASKAKNLADDMVRNTTRDLLYYAVTQDAMLIFENLSRGFGRQGKRTFMAERQYTRMEDWLTAKLAYEGLSKTYLSKTLAQYTSKTCSNCGFTITSADYDRVLEKLKKTATGWMTTINGKELKVEGQITYYNRYKRQNVVKDLSVELDRLSEESVNNDISSWTKGRSGEALSLLKKRFSHRPVQEKFVCLNCGFETHADEQAALNIARSWLFLRSQEYKKYQTNKTTGNTDKRAFVETWQSFYRKKLKEVWKPAV

SEQ ID NO: 55 - protein, 977 aa, synthetic construct
  REGION 1..977: note = CasX Variant
MQEIKRINKIRRRLVKDSNTKKAGKTGPMKTLLVRVMTPDLRERLENLRKKPENIPQPISNTSRANLNKLLTDYTEMKKAILHVYWEEFQKDPVGLMSRVAQPAPKNIDQRKLIPVKDGNERLTSSGFACSQCCQPLYVYKLEQVNDKGKPHTNYFGRCNVSEHERLILLSPHKPEANDELVTYSLGKFGQRALDFYSIHVTRESNHPVKPLEQIGGNSCASGPVGKALSDACMGAVASFLTKYQDIILEHQKVIKKNEKRLANLKDIASANGLAFPKITLPPQPHTKEGIEAYNNVVAQIVIWVNLNLWQKLKIGRDEAKPLQRLKGFPSFPLVERQANEVDWWDMVCNVKKLINEKKEDGKVFWQNLAGYKRQEALRPYLSSEEDRKKGKKFARYQFGDLLLHLEKKHGEDWGKVYDEAWERIDKKVEGLSKHIKLEEERRSEDAQSKAALTDWLRAKASFVIEGLKEADKDEFKRCELKLQKWYGSLRGKPFAIEAENSILDISGFSKQYNCAFIWQKDGVKKLNLYLIINYFKGGKLRFKKIKPEAFEANRFYTVINKKSGEIVPMEVNFNFDDPNLIILPLAFGKRQGREFIWNDLLSLETGSLKLANGRVIEKTLYNRRTRQDEPALFVALTFERREVLDSSNIKPMNLIGIDRGENIPAVIALTDPEGCPLSRFKDSLGNPTHILRIGESYKEKQRTIQAKKEVEQRRAGGYSRKYASKAKNLADDMVRNTARDLLYYAVTQDAMLIFENLSRGFGRQGKRTFMAERQYTRMEDWLTAKLAYEGLSKTYLSKTLAQYTSKTCSNCGFTITSADYDRVLEKLKKTATGWMTTINGKELKVEGQITYYNRYKRQNVVKDLSVELDRLSEESVNNDISSWTKGRSGEALSLLKKRFSHRPVQEKFVCLNCGFETHADEQAALNIARSWLFLRSQEYKKYQTNKTTGNTDKRAFVETWQSFYRKKLKEVWKPAV

SEQ ID NO: 56 - protein, 977 aa, synthetic construct
  REGION 1..977: note = CasX Variant
MQEIKRINKIRRRLVKDSNTKKAGKTGPMKTLLVRVMTPDLRERLENLRKKPENIPQPISNTSRANLNKLLTDYTEMKKAILHVYWEEFQKDPVGLMSRVAQPAPKNIDQRKLIPVKDGNERLTSSGFACSQCCQPLYVYKLEQVNDKGKPHTNYFGRCNVSEHERLILLSPHKPEANDELVTYSLGKFGQRALDFYSIHVTRESNHPVKPLEQIGGNSCASGPVGKALSDACMGAVASFLTKYQDIILEHQKVIKKNEKRLANLKDIASANGLAFPKITLPPQPHTKEGIEAYNNVVAQIVIWVNLNLWQKLKIGRDEAKPLQRLKGFPSFPLVERQANEVDWWDMVCNVKKLINEKKEDGKVFWQNLAGYKRQEALRPYLSSEEDRKKGKKFARYQFGDLLLHLEKKHGEDWGKVYDEAWERIDKKVEGLSKHIKLEEERRSEDAQSKAALTDWLRAKASFVIEGLKEADKDEFKRCELKLQKWYGDLRGKPFAIEAENSILDISGFSKQYNCAFIWQKDGVKKLNLYLIINYFKGGKLRFKKIKPEAFEANRFYTVINKKSGEIVPMEVNFNFDDPNLIILPLAFGKRQGREFIWNDLLSLETGSLKLANGRVIEKTLYNRRTRQDEPALFVALTFERREVLDSSNIKPMNLIGIDRGENIPAVIALTDPEGCPLSRFKDSLGNPTHILRIGESYKEKQRTIQAKKEVEQRRAGGYSRKYASKAKNLANDMVRNTARDLLYYAVTQDAMLIFENLSRGFGRQGKRTFMAERQYTRMEDWLTAKLAYEGLSKTYLSKTLAQYTSKTCSNCGFTITSADYDRVLEKLKKTATGWMTTINGKELKVEGQITYYNRYKRQNVVKDLSVELDRLSEESVNNDISSWTKGRSGEALSLLKKRFSHRPVQEKFVCLNCGFETHADEQAALNIARSWLFLRSQEYKKYQTNKTTGNTDKRAFVETWQSFYRKKLKEVWKPAV

SEQ ID NO: 57 - protein, 978 aa, synthetic construct
  REGION 1..978: note = CasX Variant
MQEIKRINKIRRRLVKDSNTKKAGKTGPMKTLLVRVMTPDLRERLENLRKKPENIPQPISNTSRANLNKLLTDYTEMKKAILHVYWEEFQKDPVGLMSRVAQPAPKNIDQRKLIPVKDGNERLTSSGFACSQCCQPLYVYKLEQVNDKGKPHTNYFGRCNVSEHERLILLSPHKPEANDELVTYSLGKFGQRALDFYSIHVTRESNHPVKPLEQIGGNSCASGPVGKALSDACMGAVASFLTKYQDIILEHQKVIKKNEKRLANLKDIASANGLAFPKITLPPQPHTKEGIEAYNNVVAQIVIWVNLNLWQKLKIGRDEAKPLQRLKGFPSFPLVERQANEVDWWDMVCNVKKLINEKKEDGKVFWQNLAGYKRQEALLPYLSSEEDRKKGKKFARYQFGDLLLHLEKKHGEDWGKVYDEAWERIDKKVEGLSKHIKLEEERRSEDAQSKAALTDWLRAKASFVIEGLKEADKDEFCRCELKLQKWYGDLRGKPFAIEAENSILDISGFSKQYNCAFIWQKDGVKKLNLYLIINYFKGGKLRFKKIKPEAFEANRFYTVINKKSGEIVPMEVNFNFDDPNLIILPLAFGKRQGREFIWNDLLSLETGSLKLANGRVIEKTLYNRRTRQDEPALFVALTFERREVLDSSNIKPMNLIGIDRGENIPAVIALTDPEGCPLSRFKDSLGNPTHILRIGESYKEKQRTIQAAKEKEQRRAGGYSRKYASKAKNLADDMVRNTARDLLYYAVTQDAMLIFENLSRGFGRQGKRTFMAERQYTRMEDWLTAKLAYEGLPSKTYLSKTLAQYTSKTCSNCGFTITSADYDRVLEKLKKTATGWMTTINGKELKVEGQITYYNRYKRQNVVKDLSVELDRLSEESVNNDISSWTKGRSGEALSLLKKRFSHRPVQEKFVCLNCGFETHADEQAALNIARSWLFLRSQEYKKYQTNKTTGNTDKRAFVETWQSFYRKKLKEVWKPAV

SEQ ID NO: 58 - protein, 977 aa, synthetic construct
  REGION 1..977: note = CasX Variant
MQEIKRINKIRRRLVKDSNTKKAGKTGPMKTLLVRVMTPDLRERLENLRKKPENIPQPISNTSRANLNKLLTDYTEMKKAILHVYWEEFQKDPVGLMSRVAQPAPKNIDQRKLIPVKDGNERLTSSGFACSQCCQPLYVYKLEQVNDKGKPHTNYFGRCNVSEHERLILLSPHKPEANDELVTYSLGKFGQRALDFYSIHVTRESNHPVKPLEQIGGNSCASGPVGKALSDACMGAVASFLTKYQDIILEHQKVIKKNEKRLANLKDIASANGLAFPKITLPPQPHTKEGIEAYNNVVAQIVIWVNLNLWQKLKIGRDEAKPLQRLKGFPSFPLVERQANEVDWWDMVCNVKKLINEKKEDGKVFWQNLAGYKRQEALRPYLSSEEDRKKGKKFARYQFGDLLLHLEKKHGEDWGKVYDEAWERIDKKVEGLSKHIKLEEERRSEDAQSKAALTDWLRAKASFVIEGLKEADKDEFKRCELKLQKWYGDLRGKPFAIEAENSILDISGFSKQYNCAFIWQKDGVKKLNLYLIINYFKGGKLRFKKIKPEAFEANRFYTVINKKSGEIVPMEVNFNFDDPNLIILPLAFGKRQGREFIWNDLLSLETGSLKLANGRVIEKTLYNRRTRQDEPALFVALTFERREVLDSSNIKPMNLIGIDRGENIPAVIALTDPEGCPLSRFKDSLGNPTHILRIGESYKEKQRTIQAKKEVEQRRAGGYSRKYASKAKNLADDMVRNTARDLLYYAVTQDAMLIFENLSRGFGRQGKRTFMAERQYTRMEDWLTAKLAYEGLSKTLLSKTLAQYTSKTCSNCGFTITSADYDRVLEKLKKTATGWMTTINGKELKVEGQITYYNRYKRQNVVKDLSVELDRLSEESVNNDISSWTKGRSGEALSLLKKRFSHRPVQEKFVCLNCGFETHADEQAALNIARSWLFLRSQEYKKYQTNKTTGNTDKRAFVETWQSFYRKKLKEVWKPAV

SEQ ID NO: 59 - protein, 977 aa, synthetic construct
  REGION 1..977: note = CasX Variant
MQEIKRINKIRRRLVKDSNTKKAGKTGPMKTLLVRVMTPDLRERLENLRKKPENIPQPISNTSRANLNKLLTDYTEMKKAILHVYWEEFQKDPVGLMSRVAQPAPKNIDQRKLIPVKDGNERLTSSGFACSQCCQPLYVYKLEQVNDKGKPHTNYFGRCNVSEHERLILLSPHKPEANDELVTYSLGKFGQRALDFYSIHVTRESNHPVKPLEQIGGNSCASGPVGKALSDACMGAVASFLTKYQDIILEHQKVIKKNEKRLANLKDIASANGLAFPKITLPPQPHTKEGIEAYNNVVAQIVIWVNLNLWQKLKIGRDEAKPLQRLKGFPSFPLVERQANEVDWWDMVCNVKKLINEKKEDGKVFWQNLAGYKRQEALRPYLSSEEDRKKGKKFARYQFGDLLLHLEKKHGEDWGKVYDEAWERIDKKVEGLSKHIKLEEERRSEDAQSKAALTDWLRAKASFVIEGLKEADKDEFCRCELKLQKWYGDLRGKPFAIEAENSILDISGFSKQYNCAFIWQKDGVKKLNLYLIINYFKGGKLRFKKIKPEAFEANRFYTVINKKSGEIVPMEVNFNFDDPNLIILPLAFGKRQGREFIWNDLLSLETGSLKLANGRVIEKTLYNRRTRQDEPALFVALTFERREVLDSSNIKPMNLIGIDRGENIPAVIALTDPEGCPLSRFKDSLGNPTHILRIGESYKEKQRTIQAKKEVEQRRAGGYSRKYASKAKNLADDMVRNTARDLLYYAVTQDAMLIFENLSRGFGRQGKRTFMAERQYTRMEDWLTAKLAYEGLSKTYLSKTLAQYTSKTCSNCGFTITSADYDRVLEKLKKTATGWMTTINGKELKVEGQITYYNRYKRQNVVKDLSVELDRLSEESVNNDISSWTKGRSGEALSLLKKRFSHRPVQEKFVCLNCGFETHADEQAALNIARSWLFLRSQEYKKYQTNKTTGNTDKRAFVETWQSFYRKKLKEVWKPAV

SEQ ID NO: 60 - protein, 977 aa, synthetic construct
  REGION 1..977: note = CasX Variant
MQEIKRINKIRRRLVKDSNTKKAGKTGPMKTLLVRVMTPDLRERLENLRKKPENIPQPISNTSRANLNKLLTDYTEMKKAILHVYWEEFQKDPVGLMSRVAQPAPKNIDQRKLIPVKDGNERLTSSGFACSQCCQPLYVYKLEQVNDKGKPHTNYFGRCNVSEHERLILLSPHKPEANDELVTYSLGKFGQRALDFYSIHVTRESNHPVKPLEQIGGNSCASGPVGKALSDACMGAVASFLTKYQDIILEHQKVIKKNEKRLANLKDIASANGLAFPKITLPPQPHTKEGIEAYNNVVAQIVIWVNLNLWQKLKIGRDEAKPLQRLKGFPSFPLVERQANEVDWWDMVCNVKKLINEKKEDGKVFWQNLAGYKRQEALRPYLSSEEDRKKGKKFARYQFGDLLLHLEKKHGEDWGKVYDEAWERIDKKVEGLSKHIKLEEERRSEDAQSKAALTDWLRAKASFVIEGLKEADKDEFKRCELKLQKWYGDLRGKPFAIEAENSILDISGFSKQYNCAFIWQKDGVKKLNLYLIINYFKGGKLRFKKIKPEAFEANRFYTVINKKSGEIVPMEVNFNFDDPNLIILPLAFGKRQGREFIWNDLLSLETGSLKLANGRVIEKTLYNRRTRQDEPALFVALTFERREVLDSSNIKPMNLIGIDRGENIPAVIALTDPEGCPLSRFKDSLGNPTHILRIGESYKEKQRTIQAKKEVEQRRAGGYSRKYASKAKNLADDMVRNTARDLLYYAVTQDAMLIFENLSRGFGRQGKRTFNAERQYTRMEDWLTAKLAYEGLSKTYLSKTLAQYTSKTCSNCGFTITSADYDRVLEKLKKTATGWMTTINGKELKVEGQITYYNRYKRQNVVKDLSVELDRLSEESVNNDISSWTKGRSGEALSLLKKRFSHRPVQEKFVCLNCGFETHADEQAALNIARSWLFLRSQEYKKYQTNKTTGNTDKRAFVETWQSFYRKKLKEVWKPAV

SEQ ID NO: 61 - protein, 977 aa, synthetic construct
  REGION 1..977: note = CasX Variant
MQEIKRINKIRRRLVKDSNTKKAGKTGPMKTLLVRVMTPDLRERLENLRKKPENIPQPISNTSRANLNKLLTDYTEMKKAILHVYWEEFQKDPVGLMSRVAQPAPKNIDQRKLIPVKDGNERLTSSGFACSQCCQPLYVYKLEQVNDKGKPHTNYFGRCNVSEHERLILLSPHKPEANDELVTYSLGKFGQRALDFYSIHVTRESNHPVKPLEQIGGNSCASGPVGKALSDACMGAVASFLTKYQDIILEHQKVIKKNEKRLANLKDIASANGLAFPKITLPPQPHTKEGIEAYNNVVAQIVIWVNLNLWQKLKIGRDEAKPLQRLKGFPSFPLVERQANEVDWWDMVCNVKKLINEKKEDGKVFWQNLAGYKRQEALLPYLSSESDRKKGKKFARYQFGDLLLHLEKKHGEDWGKVYDEAWERIDKKVEGLSKHIKLEEERRSEDAQSKAALTDWLRAKASFVIEGLKEADKDEFCRCELKLQKWYGDLRGKPFAIEAENSILDISGFSKQYNCAFIWQKDGVKKLNLYLIINYFKGGKLRFKKIKPEAFEANRFYTVINKKSGEIVPMEVNFNFDDPNLIILPLAFGKRQGREFIWNDLLSLETGSLKLANGRVIEKTLYNRRTRQDEPALFVALTFERREVLDSSNIKPMNLIGIDRGENIPAVIALTDPEGCPLSRFKDSLGNPTHILRIGESYKEKQRTIQAKKEVEQRRAGGYSRKYASKAKNLADDMVRNTARDLLYYAVTQDAMLIFENLSRGFGRQGKRTFMAERQYTRMEDWLTAKLAYEGLSKTYLSKTLAQYTSKTCSNCGFTITSADYDRVLEKLKKTATGWMTTINGKELKVEGQITYYNRYKRQNVVKDLSVELDRLSEESVNNDISSWTKGRSGEALSLLKKRFSHRPVQEKFVCLNCGFETHADEQAALNIARSWLFLRSQEYKKYQTNKTTGNTDKRAFVETWQSFYRKKLKEVWKPAV

SEQ ID NO: 62 - protein, 977 aa, synthetic construct
  REGION 1..977: note = CasX Variant
MQEIKRINKIRRRLVKDSNTKKAGKTGPMKTLLVRVMTPDLRERLENLRKKPENIPQPISNTSRANLNKLLTDYTEMKKAILHVYWEEFQKDPVGLMSRVAQPAPKNIDQRKLIPVKDGNERLTSSGFACSQCCQPLYVYKLEQVNDKGKPHTNYFGRCNVSEHERLILLSPHKPEANDELVTYSLGKFGQRALDFYSIHVTRESNHPVKPLEQIGGNSCASGPVGKALSDACMGAVASFLTKYQDIILEHQKVIKKNEKRLANLKDIASANGLAFPKITLPPQPHTKEGIEAYNNVVAQIVIWVNLNLWQKLKIGRDEAKPLQRLKGFPSFPLVERQANEVDWWDMVCNVKKLINEKKEDGKVFWQNLAGYKRQEALRPYLSSEEDRKKGKKFARYQFGDLLLHLEKKHGEDWGKVYDEAWERIDKKVEGLSKHIKLEEERRSEDAQSKAALTDWLRAKASFVIEGLKEADKDEFKRCELKLQKWYGDLRGKPFAIEAENSILDISGFSKQYNCAFIWQKDGVKKLNLYLIINYFKGGKLRFKKIKPEAFEANRFYTVINKKSGEIVPMEVNFNFDDPNLIILPLAFGKRQGREFIWNDLLSLETGSLKLANGRVIEKTLYNRRTRQDEPALFVALTFERREVLDSSNIKPMNLIGIDRGENIPAVIALTDPEGCPLSRFKDSLGNPTHILRIGESYKEKQRTIQAKKEVEQRRAGGYSRKYASKAKNLADDMVRNTARDLLYYAVTQDAMLIFENLSRGFGRQGKRTFMAERQYTRMEDWLTAKLAYEGLSKTYLSKTLAQYTSKTCSNCGFTITSADYDRVLEKLKKTATGWMTTINGKELKVEGQITYYNRYKRQNVVKDLSVELDRLSEESVNNDISSWTKGRSGEALSLLKKRFSHRPVQEKFVCLNCGFETHADEQAALNIARSWLFLRSQEYKKYQTNKTTGNTDKRAFVETWQSFYRKKLKEVWKPAV

SEQ ID NO: 63 - protein, 978 aa, synthetic construct
  REGION 1..978: note = CasX Variant
MQEIKRINKIRRRLVKDSNTKKAGKTGPMKTLLVRVMTPDLRERLENLRKKPENIPQPISNTSRANLNKLLTDYTEMKKAILHVYWEEFQKDPVGLMSRVAQPAPKNIDQRKLIPVKDGNERLTSSGFACSQCCQPLYVYKLEQVNDKGKPHTNYFGRCNVSEHERLILLSPHKPEANDELVTYSLGKFGQRALDFYSIHVTRESNHPVKPLEQIGGNSCASGPVGKALSDACMGAVASFLTKYQDIILEHQKVIKKNEKRLANLKDIASANGLAFPKITLPPQPHTKEGIEAYNNVVAQIVIWVNLNLWQKLKIGRDEAKPLQRLKGFPSFPLVERQANEVDWWDMVCNVKKLINEKKEDGKVFWQNLAGYKRQEALLPYLSSEEDRKKGKKFARYQFGDLLLHLEKKHGEDWGKVYDEAWERIDKKVEGLSKHIKLEEERRSEDAQSKAALTDWLRAKASFVIEGLKEADKDEFCRCELKLQKWYGDLRGKPFAIEAENSILDISGFSKQYNCAFIWQKDGVKKLNLYLIINYFKGGKLRFKKIKPEAFEANRFYTVINKKSGEIVPMEVNFNFDDPNLIILPLAFGKRQGREFIWNDLLSLETGSLKLANGRVIEKTLYNRRTRQDEPALFVALTFERREVLDSSNIKPMNLIGIDRGENIPAVIALTDPEGCPLSRFKDSLGNPTHILRIGESYKEKQRTIQAAKEVEQRRAGGYSRKYASKAKNLADDMVRNTARDLLYYAVTQDAMLIFENLSRGFGRQGKRTFMAERQYTRMEDWLTAKLAYEGDPSKTYLSKTLAQYTSKTCSNCGFTITSADYDRVLEKLKKTATGWMTTINGKELKVEGQITYYNRYKRQNVVKDLSVELDRLSEESVNNDISSWTKGRSGEALSLLKKRFSHRPVQEKFVCLNCGFETHADEQAALNIARSWLFLRSQEYKKYQTNKTTGNTDKRAFVETWQSFYRKKLKEVWKPAV

SEQ ID NO: 64 - protein, 978 aa, synthetic construct
  REGION 1..978: note = CasX Variant
MQEIKRINKIRRRLVKDSNTKKAGKTGPMKTLLVRVMTPDLRERLENLRKKPENIPQPISNTSRANLNKLLTDYTEMKKAILHVYWEEFQKDPVGLMSRVAQPAPKNIDQRKLIPVKDGNERLTSSGFACSQCCQPLYVYKLEQVNDKGKPHTNYFGRCNVSEHERLILLSPHKPEANDELVTYSLGKFGQRALDFYSIHVTRESNHPVKPLEQIGGNSCASGPVGKALSDACMGAVASFLTKYQDIILEHQKVIKKNEKRLANLKDIASANGLAFPKITLPPQPHTKEGIEAYNNVVAQIVIWVNLNLWQKLKIGRDEAKPLQRLKGFPSFPLVERQANEVDWWDMVCNVKKLINEKKEDGKVFWQNLAGYKRQEALLPYLSSEEDRKKGKKFARYQFGDLLLHLEKKHGEDWGKVYDEAWERIDKKVEGLSKHIKLEEERRSEDAQSKAALTDWLRAKASFVIEGLKEADKDEFCRCELKLQKWYGDLRGKPFAIEAENSILDISGFSKQYNCAFIWQKDGVKKLNLYLIINYFKGGKLRFKKIKPEAFEANRFYTVINKKSGEIVPMEVNFNFDDPNLIILPLAFGKRQGREFIWNDLLSLETGSLKLANGRVIEKTLYNRRTRQDEPALFVALTFERREVLDSSNIKPMNLIGIDRGENIPAVIALTDPEGCPLSRFKDSLGNPTHILRIGESYKEKQRTIQAAKEVEQRRAGGYSRKYASKAKNLADDMVRNTARDLLYYAVTQDAMLIFENLSRGFGRQGKRTFMAERQYTRMEDWLTAKLAYEFLPSKTYLSKTLAQYTSKTCSNCGFTITSADYDRVLEKLKKTATGWMTTINGKELKVEGQITYYNRYKRQNVVKDLSVELDRLSEESVNNDISSWTKGRSGEALSLLKKRFSHRPVQEKFVCLNCGFETHADEQAALNIARSWLFLRSQEYKKYQTNKTTGNTDKRAFVETWQSFYRKKLKEVWKPAV

SEQ ID NO: 65 - protein, 977 aa, synthetic construct
  REGION 1..977: note = CasX Variant
MQEIKRINKIRRRLVKDSNTKKAGKTGPMKTLLVRVMTPDLRERLENLRKKPENIPQPISNTSRANLNKLLTDYTEMKKAILHVYWEEFQKDPVGLMSRVAQPAPKNIDQRKLIPVKDGNERLTSSGFACSQCCQPLYVYKLEQVNDKGKPHTNYFGRCNVSEHERLILLSPHKPEANDELVTYSLGKFGQRALDFYSIHVTRESNHPVKPLEQIGGNSCASGPVGKALSDACMGAVASFLTKYQDIILEHQKVIKKNEKRLANLKDIASANGLAFPKITLPPQPHTKEGIEAYNNVVAQIVIWVNLNLWQKLKIGRDEAKPLQRLKGFPSFPLVERQANEVDWWDMVCNVKKLINEKKEDGKVFWQNLAGYKRQEALLPYLSSEEDRKKGKKFARYQFGDLLLHLEKKHGEDWGKVYDEAWERIDKKVEGLSKHIKLEEERRSEDAQSKAALTDWLRAKASFVIEGLKEADKDEFCRCELKLQKWYGDLRGKPFAIEAENSILDISGFSKQYNCAFIWQKDGVKKLNLYLIINYFKGGKLRFKKIKPEAFEANRFYTVINKKSGEIVPMEVNFNFDDPNLIILPLAFGKRQGREFIWNDLLSLETGSLKLANGRVIEKTLYNRRTRQDEPALFVALTFERREVLDSSNIKPMNLIGIDRGENIPAVIALTDPEGCPLSRFKDSLGNPTHILRIGESYKEKQRTIQAKKEVEQRRAGGYSRKYASKAKNLADDMVRNTVRDLLYYAVTQDAMLIFENLSRGFGRQGKRTFMAERQYTRMEDWLTAKLAYEGLSKTYLSKTLAQYTSKTCSNCGFTITSADYDRVLEKLKKTATGWMTTINGKELKVEGQITYYNRYKRQNVVKDLSVELDRLSEESVNNDISSWTKGRSGEALSLLKKRFSHRPVQEKFVCLNCGFETHADEQAALNIARSWLFLRSQEYKKYQTNKTTGNTDKRAFVETWQSFYRKKLKEVWKPAV

SEQ ID NO: 66 - protein, 977 aa, synthetic construct
  REGION 1..977: note = CasX Variant
MQEIKRINKIRRRLVKDSNTKKAGKTGPMKTLLVRVMTPDLRERLENLRKKPENIPQPISNTSRANLNKLLTDYTEMKKAILHVYWEEFQKDPVGLMSRVAQPAPKNIDQRKLIPVKDGNERLTSSGFACSQCCQPLYVYKLEQVNDKGKPHTNYFGRCNVSEHERLILLSPHKPEANDELVTYSLGKFGQRALDFYSIHVTRESNHPVKPLEQIGGNSCASGPVGKALSDACMGAVASFLTKYQDIILEHQKVIKKNEKRLANLKDIASANGLAFPKITLPPQPHTKEGIEAYNNVVAQIVIWVNLNLWQKLKIGRDEAKPLQRLKGFPSFPLVERQANEVDWWDMVCNVKKLINEKKEDGKVFWQNLAGYKRQEALRPYLSSEEDRKKGKKFARYQFGDLLLHLEKKHGEDWGKVYDEAWERIDKKVEGLSKHIKLEEERRSEDAQSKAALTDWLRAKASFVIEGLKEADKDEFCRCELKLQKWYGDLRGKPFAIEAENSILDISGFSKQYNCAFIWQKDGVKKLNLYLIINYFKGGKLRFKKIKPEAFEANRFYTVINKKSGEIVPMEVNFNFDDPNLIILPLAFGKRQGREFIWNDLLSLETGSLKLANGRVIEKTLYNRRTRQDEPALFVALTFERREVLDSSNIKPMNLIGIDRGENIPAVIALTDPEGCPLSRFKDSLGNPTHILRIGESYKEKQRTIQAKKEVEQRRAGGYSRKYASKAKNLADDMVRNTVRDLLYYAVTQDAMLIFENLSRGFGRQGKRTFMAERQYTRMEDWLTAKLAYEGLSKTYLSKTLAQYTSKTCSNCGFTITSADYDRVLEKLKKTATGWMTTINGKELKVEGQITYYNRYKRQNVVKDLSVELDRLSEESVNNDISSWTKGRSGEALSLLKKRFSHRPVQEKFVCLNCGFETHADEQAALNIARSWLFLRSQEYKKYQTNKTTGNTDKRAFVETWQSFYRKKLKEVWKPAV

SEQ ID NO: 67 - protein, 977 aa, synthetic construct
  REGION 1..977: note = CasX Variant
MQEIKRINKIRRRLVKDSNTKKAGKTGPMKTLLVRVMTPDLRERLENLRKKPENIPQPISNTSRANLNKLLTDYTEMKKAILHVYWEEFQKDPVGLMSRVAQPAPKNIDQRKLIPVKDGNERLTSSGFACSQCCQPLYVYKLEQVNDKGKPHTNYFGRCNVSEHERLILLSPHKPEANDELVTYSLGKFGQRALDFYSIHVTRESNHPVKPLEQIGGNSCASGPVGKALSDACMGAVASFLTKYQDIILEHQKVIKKNEKRLANLKDIASANGLAFPKITLPPQPHTKEGIEAYNNVVAQIVIWVNLNLWQKLKIGRDEAKPLQRLKGFPSFPLVERQANEVDWWDMVCNVKKLINEKKEDGKVFWQNLAGYKRQEALLPYLSSEEDRKKGKKFARYQFGDLLLHLEKKHGEDWGKVYDEAWERIDKKVEGLSKHIKLEEERRSEDAQSKAALTDWLRAKASFVIEGLKEADKDEFKRCELKLQKWYGDLRGKPFAIEAENSILDISGFSKQYNCAFIWQKDGVKKLNLYLIINYFKGGKLRFKKIKPEAFEANRFYTVINKKSGEIVPMEVNFNFDDPNLIILPLAFGKRQGREFIWNDLLSLETGSLKLANGRVIEKTLYNRRTRQDEPALFVALTFERREVLDSSNIKPMNLIGIDRGENIPAVIALTDPEGCPLSRFKDSLGNPTHILRIGESYKEKQRTIQAKKEVEQRRAGGYSRKYASKAKNLADDMVRNTARDLLYYAVTQDAMLIFENLSRGFGRQGKRTFMAERQYTRMEDWLTAKLAYEGLSKTYLSKTLAQYTSKTCSNCGFTITSADYDRVLEKLKKTATGWMTTINGKELKVEGQITYYNRYKRQNVVKDLSVELDRLSEESVNNDISSWTKGRSGEALSLLKKRFSHRPVQEKFVCLNCGFETHADEQAALNIARSWLFLRSQEYKKYQTNKTTGNTDKRAFVETWQSFYRKKLKEVWKPAV

SEQ ID NO: 68 - protein, 978 aa, synthetic construct
  REGION 1..978: note = CasX Variant
MQEIKRINKIRRRLVKDSNTKKAGKTGPMKTLLVRVMTPDLRERLENLRKKPENIPQPISNTSRANLNKLLTDYTEMKKAILHVYWEEFQKDPVGLMSRVAQPAPKNIDQRKLIPVKDGNERLTSSGFACSQCCQPLYVYKLEQVNDKGKPHTNYFGRCNVSEHERLILLSPHKPEANDELVTYSLGKFGQRALDFYSIHVTRESNHPVKPLEQIGGNSCASGPVGKALSDACMGAVASFLTKYQDIIIEHQKVIKKNEKRLANLKDIASANGLAFPKITLPPQPHTKEGIEAYNNVVAQIVIWVNLNLWQKLKIGRDEAKPLQRLKGFPSFPLVERQANEVDWWDMVCNVKKLINEKKEDGKVFWQNLAGYKRQEALLPYLSSEEDRKKGKKFARYQFGDLLLHLEKKHGEDWGKVYDEAWERIDKKVEGLSKHIKLEEERRSEDAQSKAALTDWLRAKASFVIEGLKEADKDEFCRCELKLQKWYGDLRGKPFAIEAENSILDISGFSKQYNCAFIWQKDGVKKLNLYLIINYFKGGKLRFKKIKPEAFEANRFYTVINKKSGEIVPMEVNFNFDDPNLIILPLAFGKRQGREFIWNDLLSLETGSLKLANGRVIEKTLYNRRTRQDEPALFVALTFERREVLDSSNIKPMNLIGIDRGENIPAVIALTDPEGCPLSRFKDSLGNPTHILRIGESYKEKQRTIQAAKEVEQRRAGGYSRKYASKAKNLADDMVRNTARDLLYYAVTQDAMLIFENLSRGFGRQGKRTFNAERQYTRMEDWLTAKLAYEGLPSKTYLSKTLAQYTSKTCSNCGFTITSADYDRVLEKLKKTATGWMTTINGKELKVEGQITYYNRYKRQNVVKDLSVELDRLSEESVNNDISSWTKGRSGEALSLLKKRFSHRPVQEKFVCLNCGFETHADEQAALNIARSWLFLRSQEYKKYQTNKTTGNTDKRAFVETWQSFYRKKLKEVWKPAV

SEQ ID NO: 69 - protein, 978 aa, synthetic construct
  REGION 1..978: note = CasX Variant
MQEIKRINKIRRRLVKDSNTKKAGKTGPMKTLLVRVMTPDLRERLENLRKKPENIPQPISNTSRANLNKLLTDYTEMKKAILHVYWEEFQKDPVGLMSRVAQPAPKNIDQRKLIPVKDGNERLTSSGFACSQCCQPLYVYKLEQVNDKGKPHTNYFGRCNVSEHERLILLSPHKPEANDELVTYSLGKFGQRALDFYSIHVTRESNHPVKPLEQIGGNSCASGPVGKALSDACMGAVASFLTKYQDIILEHQKVIKKNEKRLANLKDIASANGLAFPKITLPPQPHTKEGIEAYNNVVAQIVIWVNLNLWQKLKIGRDEAKPLQRLKGFPSFPLVERQANEVDWWDMVCNVKKLINEKKEDGKVFWQNLAGYKRQEALLPYLSSEEDRKKGKKFARYQFGDLLLHLEKKHGEDWGKVYDEAWERIDKKVEGLSKHIKLEEERRSEDAQSKAALTDWLRAKASFVIEGLKEADKDEFCRCELKLQKWYGDLRGKPFAIEAENSILDISGFSKQYNCAFIWQKDGVKKLNLYLIINYFKGGKLRFKKIKPEAFEANRFYTVINKKSGEIVPMEVNFNFDDPNLIILPLAFGKRQGREFIWNDLLSLETGSLKLANGRVIEKTLYNRRTRQDEPALFVALTFERREVLDSSNIKPMNLIGIDRGENIPAVIALTDPEGCPLSRFKDSLGNPTHILRIGESYKEKQRTIQAAKEVEQRRAGGYSRKYASKAKNLADDMVRNTARDLLYYAKTQDAMLIFENLSRGFGRQGKRTFMAERQYTRMEDWLTAKLAYEGLPSKTYLSKTLAQYTSKTCSNCGFTITSADYDRVLEKLKKTATGWMTTINGKELKVEGQITYYNRYKRQNVVKDLSVELDRLSEESVNNDISSWTKGRSGEALSLLKKRFSHRPVQEKFVCLNCGFETHADEQAALNIARSWLFLRSQEYKKYQTNKTTGNTDKRAFVETWQSFYRKKLKEVWKPAV

SEQ ID NO: 70 - protein, 977 aa, synthetic construct
  REGION 1..977: note = CasX Variant
MQEIKRINKIRRRLVKDSNTKKAGKTGPMKTLLVRVMTPDLRERLENLRKKPENIPQPISNTSRANLNKLLTDYTEMKKAILHVYWEEFQKDPVGLMSRVAQPAPKNIDQRKLIPVKDGNERLTSSGFACSQCCQPLYVYKLEQVNDKGKPHTNYFGRCNVSEHERLILLSPHKPEANDELVTYSLGKFGQRALDFYSIHVTRESNHPVKPLEQIGGNSCASGPVGKALSDACMGAVASFLTKYQDIILEHQKVIKKNEKRLANLKDIASANGLAFPKITLPPQPHTKEGIEAYNNVVAQIVIWVNLNLWQKLKIGRDEAKPLQRLKGFPSFPLVERQANEVDWWDMVCNVKKLINEKKEDGKVFWQNLAGYKRQEALRPYLSSEEDRKKGKKFARYQFGDLLLHLEKKHGEDWGKVYDEAWERIDKKVEGLSKHIKLEEERRSEDAQSKAALTDWLRAKASFVIEGLKEADKDEFKRCELKLQKWYGDLRGKPFAIEAENSILDISGFSKQYNCAFIWQKDGVKKLNLYLIINYFKGGKLRFKKIKPEAFEANRFYTVINKKSGEIVPMEVNFNFDDPNLIILPLAFGKRQGREFIWNDLLSLETGSLKLANGRVIEKTLYNRRTRQDEPALFVALTFERREVLDSSNIKPMNLIGIDRGENIPAVIALTDPEGCPLSRFKDSLGNPTHILRIGESYKEKQRTIQAKKEVEQRRAGGYSRKYASKAKNLADDMVRNTARDLLYYAVTQDAMLIFENLSRGFGRQGKRTFMAERQYTRNEDWLTAKLAYEGLSKTYLSKTLAQYTSKTCSNCGFTITSADYDRVLEKLKKTATGWMTTINGKELKVEGQITYYNRYKRQNVVKDLSVELDRLSEESVNNDISSWTKGRSGEALSLLKKRFSHRPVQEKFVCLNCGFETHADEQAALNIARSWLFLRSQEYKKYQTNKTTGNTDKRAFVETWQSFYRKKLKEVWKPAV

SEQ ID NO: 71 - protein, 978 aa, synthetic construct
  REGION 1..978: note = CasX Variant
MQEIKRINKIRRRLVKDSNTKKAGKTGPMKTLLVRVMTPDLRERLENLRKKPENIPQPISNTSRANLNKLLTDYTEMKKAILHVYWEEFQKDPVGLMSRVAQPAPKNIDQRKLIPVKDGNERLTSSGFACSQCCQPLYVYKLEQVNDKGKPHTNYFGRCNVSEHERLILLSPHKPEANDELVTYSLGKFGQRALDFYSIHVTRESNHPVKPLEQIGGNSCASGPVGKALSDACMGAVASFLTKYQDIILEHQKVIKKNEKRLANLKDIASANGLAFPKITLPPQPHTKEGIEAYNNVVAQIVIWVNLNLWQKLKIGRDEAKPLQRLKGFPSFPLVERQANEVDWWDMVCNVKKLINEKKEDGKVFWQNLAGYKRQEALLPYLSSEEDRKKGKKFARYQFGDLLLHLEKKHGEDWGKVYDEAWERIDKKVEGLSKHIKLEEERRSEDAQSKAALTDWLRAKASFVIEGLKEADKDEFCRCELKLQKWYGDLRGKPFAIEAENSILDISGFSKQYNCAFIWQKDGVKKLNLYLIINYFKGGKLRFKKIKPEAFEANRFYTVINKKSGEIVPMEVNFNFDDPNLIILPLAFGKRQGREFIWNDLLSLETGSLKLANGRVIEKTLYNRRTRQDEPALFVALTFERREVLDSSNIKPMNLIGIDRGENIPAVIALTDPEGCPLSRFKDSLGNPTHILRIGESYKEKQRTIQAAKEVEQRRAGGYSRKYASKAKNLADDMVRNTARDLLYYAVTQDAMLIMENLSRGFGRQGKRTFMAERQYTRMEDWLTAKLAYEGLPSKTYLSKTLAQYTSKTCSNCGFTITSADYDRVLEKLKKTATGWMTTINGKELKVEGQITYYNRYKRQNVVKDLSVELDRLSEESVNNDISSWTKGRSGEALSLLKKRFSHRPVQEKFVCLNCGFETHADEQAALNIARSWLFLRSQEYKKYQTNKTTGNTDKRAFVETWQSFYRKKLKEVWKPAV

SEQ ID NO: 72 - protein, 977 aa, synthetic construct
  REGION 1..977: note = CasX Variant
MQEIKRINKIRRRLVKDSNTKKAGKTGPMKTLLVRVMTPDLRERLENLRKKPENIPQPISNTSRANLNKLLTDYTEMKKAILHVYWEEFQKDPVGLMSRVAQPAPKNIDQRKLIPVKDGNERLTSSGFACSQCCQPLYVYKLEQVNDKGKPHTNYFGRCNVSEHERLILLSPHKPEANDELVTYSLGKFGQRALDFYSIHVTRESNHPVKPLEQIGGNSCASGPVGKALSDACMGAVASFLTKYQDIILEHQKVIKKNEKRLANLKDIASANGLAFPKITLPPQPHTKEGIEAYNNVVAQIVIWVNLNLWQKLKIGRDEAKPLQRLKGFPSFPLVERQANEVDWWDMVCNVKKLINEKKEDGKVFWQNLAGYKRQEALRPYLSSEEDRKKGKKFARYQFGDLLLHLEKKHGEDWGKVYDEAWERIDKKVEGLSKHIKLEEERRSEDAQSKAALTDWLRAKASFVIEGLKEADKDEFCRCELKLQKWYGDLRGKPFAIEAENSILDISGFSKQYNCAFIWQKDGVKKLNLYLIINYFKGGKLRFKKIKPEAFEANRFYTVINKKSGEIVPMEVNFNFDDPNLIILPLAFGKRQGREFIWNDLLSLETGSLKLANGRVIEKTLYNRRTRQDEPALFVALTFERREVLDSSNIKPMNLIGIDRGENIPAVIALTDPEGCPLSRFKDSLGNPTHILRIGESYKEKQRTIQAKKEVEQRRAGGYSRKYASKAKNLADDMVRNTARDLLYYAVTQDAMLIFENLSRGFGRQGKRTFMAERQYTRMEDWLTAKLAYEGLSKTYLSKTLAQYTSKTCSNCGFTITSADYDRVLEKLKKTATGWMTTINGKELKVEGQITYYNRRKRQNVVKDLSVELDRLSEESVNNDISSWTKGRSGEALSLLKKRFSHRPVQEKFVCLNCGFETHADEQAALNIARSWLFLRSQEYKKYQTNKTTGNTDKRAFVETWQSFYRKKLKEVWKPAV

SEQ ID NO: 73 - protein, 977 aa, synthetic construct
  REGION 1..977: note = CasX Variant
MQEIKRINKIRRRLVKDSNTKKAGKTGPMKTLLVRVMTPDLRERLENLRKKPENIPQPISNTSRANLNKLLTDYTEMKKAILHVYWEEFQKDPVGLMSRVAQPAPKNIDQRKLIPVKDGNERLTSSGFACSQCCQPLYVYKLEQVNDKGKPHTNYFGRCNVSEHERLILLSPHKPEANDELVTYSLGKFGQRALDFYSIHVTRESNHPVKPLEQIGGNSCASGPVGKALSDACMGAVASFLTKYQDIILEHQKVIKKNEKRLANLKDIASANGLAFPKITLPPQPHTKEGIEAYNNVVAQIVIWVNLNLWQKLKIGRDEAKPLQRLKGFPSFPLVERQANEVDWWDMVCNVKKLINEKKEDGKVFWQNLAGYKRQEALRPYLSSEEDRKKGKKFARYQFGDLLLHLEKKHGEDWGKVYDEAWERIDKKVEGLSKHIKLEEERRSEDAQSKAALTDWLRAKASFVIEGLKEADKDEFCRCELKLQKWYGDLRGKPFAIEAENSILDISGFSKQYNCAFIWQKDGVKKLNLYLIINYFKGGKLRFKKIKPEAFEANRFYTVINKKSGEIVPMEVNFNFDDPNLIILPLAFGKRQGREFIWNDLLSLETGSLKLANGRVIEKTLYNRRTRQDEPALFVALTFERREVLDSSNIKPMNLIGVDRGENIPAVIALTDPEGCPLSRFKDSLGNPTHILRIGESYKEKQRTIQAKKEVEQRRAGGYSRKYASKAKNLADDMVRNTARDLLYYAVTQDAMLIFENLSRGFGRQGKRTFMAERQYTRMEDWLTAKLAYEGLSKTYLSKTLAQYTSKTCSNCGFTITSADYDRVLEKLKKTATGWMTTINGKELKVEGQITYYNRRKRQNVVKDLSVELDRLSEESVNNDISSWTKGRSGEALSLLKKRFSHRPVQEKFVCLNCGFETHADEQAALNIARSWLFLRSQEYKKYQTNKTTGNTDKRAFVETWQSFYRKKLKEVWKPAV

SEQ ID NO: 74 - protein, 977 aa, synthetic construct
  REGION 1..977: note = CasX Variant
MQEIKRINKIRRRLVKDSNTKKAGKTGPMKTLLVRVMTPDLRERLENLRKKPENIPQPISNTSRANLNKLLTDYTEMKKAILHVYWEEFQKDPVGLMSRVAQPAPKNIDQRKLIPVKDGNERLTSSGFACSQCCQPLYVYKLEQVNDKGKPHTNYFGRCNVSEHERLILLSPHKPEANDELVTYSLGKFGQRALDFYSIHVTRESNHPVKPLEQIGGNSCASGPVGKALSDACMGAVASFLTKYQDIILEHQKVIKKNEKRLANLKDIASANGLAFPKITLPPQPHTKEGIEAYNNVVAQIVIWVNLNLWQKLKIGRDEAKPLQRLKGFPSFPLVERQANEVDWWDMVCNVKKLINEKKEDGKVFWQNLAGYKRQEALRPYLSSENDRKKGKKFARYQFGDLLLHLEKKHGEDWGKVYDEAWERIDKKVEGLSKHIKLEEERRSEDAQSKAALTDWLRAKASFVIEGLKEADKDEFCRCELKLQKWYGDLRGKPFAIEAENSILDISGFSKQYNCAFIWQKDGVKKLNLYLIINYFKGGKLRFKKIKPEAFEANRFYTVINKKSGEIVPMEVNFNFDDPNLIILPLAFGKRQGREFIWNDLLSLETGSLKLANGRVIEKTLYNRRTRQDEPALFVALTFERREVLDSSNIKPMNLIGVDRGENIPAVIALTDPEGCPLSRFKDSLGNPTHILRIGESYKEKQRTIQAKKEVEQRRAGGYSRKYASKAKNLADDMVRNTARDLLYYAVTQDAMLIFENLSRGFGRQGKRTFMAERQYTRMEDWLTAKLAYEGLSKTYLSKTLAQYTSKTCSNCGFTITSADYDRVLEKLKKTATGWMTTINGKELKVEGQITYYNRRKRQNVVKDLSVELDRLSEESVNNDISSWTKGRSGEALSLLKKRFSHRPVQEKFVCLNCGFETHADEQAALNIARSWLFLRSQEYKKYQTNKTTGNTDKRAFVETWQSFYRKKLKEVWKPAV

SEQ ID NO: 75 - protein, 977 aa, synthetic construct
  REGION 1..977: note = CasX Variant
MQEIKRINKIRRRLVKDSNTKKAGKTGPMKTLLVRVMTPDLRERLENLRKKPENIPQPISNTSRANLNKLLTDYTEMKKAILHVYWEEFQKDPVGLMSRVAQPAPKNIDQRKLIPVKDGNERLTSSGFACSQCCQPLYVYKLEQVNDKGKPHTNYFGRCNVSEHERLILLSPHKPEANDELVTYSLGKFGQRALDFYSIHVTRESNHPVKPLEQIGGNSCASGPVGKALSDACMGAVASFLTKYQDIILEHQKVIKKNEKRLANLKDIASANGLAFPKITLPPQPHTKEGIEAYNNVVAQIVIWVNLNLWQKLKIGRDEAKPLQRLKGFPSFPLVERQANEVDWWDMVCNVKKLINEKKEDGKVFWQNLAGYKRQEALRPYLSSEEDRKKGKKFARYQFGDLLKHLEKKHGEDWGKVYDEAWERIDKKVEGLSKHIKLEEERRSEDAQSKAALTDWLRAKASFVIEGLKEADKDEFCRCELKLQKWYGDLRGKPFAIEAENSILDISGFSKQYNCAFIWQKDGVKKLNLYLIINYFKGGKLRFKKIKPEAFEANRFYTVINKKSGEIVPMEVNFNFDDPNLIILPLAFGKRQGREFIWNDLLSLETGSLKLANGRVIEKTLYNRRTRQDEPALFVALTFERREVLDSSNIKPMNLIGVDRGENIPAVIALTDPEGCPLSRFKDSLGNPTHILRIGESYKEKQRTIQAKKEVEQRRAGGYSRKYASKAKNLADDMVRNTARDLLYYAVTQDAMLIFENLSRGFGRQGKRTFMAERQYTRMEDWLTAKLAYEGLSKTYLSKTLAQYTSKTCSNCGFTITSADYDRVLEKLKKTATGWMTTINGKELKVEGQITYYNRRKRQNVVKDLSVELDRLSEESVNNDISSWTKGRSGEALSLLKKRFSHRPVQEKFVCLNCGFETHADEQAALNIARSWLFLRSQEYKKYQTNKTTGNTDKRAFVETWQSFYRKKLKEVWKPAV

SEQ ID NO: 76 - protein, 978 aa, synthetic construct
  REGION 1..978: note = CasX Variant
MQEIKRINKIRRRLVKDSNTKKAGKTGPMKTLLVRVMTPDLRERLENLRKKPENIPQPISNTSRANLNKLLTDYTEMKKAILHVYWEEFQKDPVGLMSRVAQPAPKNIDQRKLIPVKDGNERLTSSGFACSQCCQPLYVYKLEQVNDKGKPHTNYFGRCNVSEHERLILLSPHKPEANDELVTYSLGKFGQVRALDFYSIHVTRESNHPVKPLEQIGGNSCASGPVGKALSDACMGAVASFLTKYQDIILEHQKVIKKNEKRLANLKDIASANGLAFPKITLPPQPHTKEGIEAYNNVVAQIVIWVNLNLWQKLKIGRDEAKPLQRLKGFPSFPLVERQANEVDWWDMVCNVKKLINEKKEDGKVFWQNLAGYKRQEALRPYLSSEEDRKKGKKFARYQFGDLLLHLEKKHGEDWGKVYDEAWERIDKKVEGLSKHIKLEEERRSEDAQSKAALTDWLRAKASFVIEGLKEADKDEFCRCELKLQKWYGDLRGKPFAIEAENSILDISGFSKQYNCAFIWQKDGVKKLNLYLIINYFKGGKLRFKKIKPEAFEANRFYTVINKKSGEIVPMEVNFNFDDPNLIILPLAFGKRQGREFIWNDLLSLETGSLKLANGRVIEKTLYNRRTRQDEPALFVALTFERREVLDSSNIKPMNLIGVDRGENIPAVIALTDPEGCPLSRFKDSLGNPTHILRIGESYKEKQRTIQAKKEVEQRRAGGYSRKYASKAKNLADDMVRNTARDLLYYAVTQDAMLIFENLSRGFGRQGKRTFMAERQYTRMEDWLTAKLAYEGLSKTYLSKTLAQYTSKTCSNCGFTITSADYDRVLEKLKKTATGWMTTINGKELKVEGQITYYNRRKRQNVVKDLSVELDRLSEESVNNDISSWTKGRSGEALSLLKKRFSHRPVQEKFVCLNCGFETHADEQAALNIARSWLFLRSQEYKKYQTNKTTGNTDKRAFVETWQSFYRKKLKEVWKPAV

SEQ ID NO: 77 - protein, 977 aa, synthetic construct
  REGION 1..977: note = CasX Variant
MQEIKRINKIRRRLVKDSNTKKAGKTGPMKTLLVRVMTPDLRERLENLRKKPENIPQPISNTSRANLNKLLTDYTEMKKAILHVYWEEFQKDPVGLMSRVAQPAPKNIDQRKLIPVKDGNERLTSSGFACSQCCQPLYVYKLEQVNDKGKPHTNYFGRCNVSEHERLILLSPHKPEANDELVTYSLGKFGQRALDFYSIHVTRESNHPVKPLEQIGGNSCASGPVGKALSDACMGAVASFLTKYQDIILEHQKVIKKNEKRLANLKDIASANGLAFPKITLPPQPHTKEGIEAYNNVVAQIVIWVNLNLWQKLKIGRDEAKPLQRLKGFPSFPLVERQANEVDWWDMVCNVKKLINEKKEDGKVFWQNLAGYKRQEALRPYLSSENDRKKGKKFARYQFGDLLKHLEKKHGEDWGKVYDEAWERIDKKVEGLSKHIKLEEERRSEDAQSKAALTDWLRAKASFVIEGLKEADKDEFCRCELKLQKWYGDLRGKPFAIEAENSILDISGFSKQYNCAFIWQKDGVKKLNLYLIINYFKGGKLRFKKIKPEAFEANRFYTVINKKSGEIVPMEVNFNFDDPNLIILPLAFGKRQGREFIWNDLLSLETGSLKLANGRVIEKTLYNRRTRQDEPALFVALTFERREVLDSSNIKPMNLIGVDRGENIPAVIALTDPEGCPLSRFKDSLGNPTHILRIGESYKEKQRTIQAKKEVEQRRAGGYSRKYASKAKNLADDMVRNTARDLLYYAVTQDAMLIFENLSRGFGRQGKRTFMAERQYTRMEDWLTAKLAYEGLSKTYLSKTLAQYTSKTCSNCGFTITSADYDRVLEKLKKTATGWMTTINGKELKVEGQITYYNRRKRQNVVKDLSVELDRLSEESVNNDISSWTKGRSGEALSLLKKRFSHRPVQEKFVCLNCGFETHADEQAALNIARSWLFLRSQEYKKYQTNKTTGNTDKRAFVETWQSFYRKKLKEVWKPAV

SEQ ID NO: 78 - protein, 977 aa, synthetic construct
  REGION 1..977: note = CasX Variant
MQEIKRINKIRRRLVKDSNTKKAGKTGPMKTLLVRVMTPDLRERLENLRKKPENIPQPISNTSRANLNKLLTDYTEMKKAILHVYWEEFQKDPVGLMSRVAQPAPKNIDQRKLIPVKDGNERLTSSGFACSQCCQPLYVYKLEQVNDKGKPHTNYFGRCNVSEHERLILLSPHKPEANDELVTYSLGKFGQRALDFYSIHVTRESNHPVKPLEQIGGNSCASGPVGKALSDACMGAVASFLTKYQDIILEHQKVIKKNEKRLANLKDIASANGLAFPKITLPPQPHTKEGIEAYNNVVAQIVIWVNLNLWQKLKIGRDEAKPLQRLKGFPSFPLVERQANEVDWWDMVCNVKKLINEKKEDGKVFWQNLAGYKRQEALRPYLSSEEDRKKGKKFARYQLGDLLLHLEKKHGEDWGKVYDEAWERIDKKVEGLSKHIKLEEERRSEDAQSKAALTDWLRAKASFVIEGLKEADKDEFCRCELKLQKWYGDLRGKPFAIEAENSILDISGFSKQYNCAFIWQKDGVKKLNLYLIINYFKGGKLRFKKIKPEAFEANRFYTVINKKSGEIVPMEVNFNFDDPNLIILPLAFGKRQGREFIWNDLLSLETGSLKLANGRVIEKTLYNRRTRQDEPALFVALTFERREVLDSSNIKPMNLIGVDRGENIPAVIALTDPEGCPLSRFKDSLGNPTHILRIGESYKEKQRTIQAKKEVEQRRAGGYSRKYASKAKNLADDMVRNTARDLLYYAVTQDAMLIFENLSRGFGRQGKRTFMAERQYTRMEDWLTAKLAYEGLSKTYLSKTLAQYTSKTCSNCGFTITSADYDRVLEKLKKTATGWMTTINGKELKVEGQITYYNRRKRQNVVKDLSVELDRLSEESVNNDISSWTKGRSGEALSLLKKRFSHRPVQEKFVCLNCGFETHADEQAALNIARSWLFLRSQEYKKYQTNKTTGNTDKRAFVETWQSFYRKKLKEVWKPAV

SEQ ID NO: 79 - protein, 977 aa, synthetic construct
  REGION 1..977: note = CasX Variant
MQEIKRINKIRRRLVKDSNTKKAGKTGPMKTLLVRVMTPDLRERLENLRKKPENIPQPISNTSRANLNKLLTDYTEMKKAILHVYWEEFQKDPVGLMSRVAQPAPKNIDQRKLIPVKDGNERLTSSGFACSQCCQPLYVYKLEQVNDKGKPHTNYFGRCNVSEHERLILLSPHKPEANDELVTYSLGKFGQRALDFYSIHVTRESNHPVKPLEQIGGNSCASGPVGKALSDACMGAVASFLTKYQDIILEHQKVIKKNEKRLANLKDIASANGLAFPKITLPPQPHTKEGIEAYNNVVAQIVIWVNLNLWQKLKIGRDEAKPLQRLKGFPSFPLVERQANEVDWWDMVCNVKKLINEKKEDGKVFWQNLAGYKRQEALRPYLSSENDRKKGKKFARYQLGDLLLHLEKKHGEDWGKVYDEAWERIDKKVEGLSKHIKLEEERRSEDAQSKAALTDWLRAKASFVIEGLKEADKDEFCRCELKLQKWYGDLRGKPFAIEAENSILDISGFSKQYNCAFIWQKDGVKKLNLYLIINYFKGGKLRFKKIKPEAFEANRFYTVINKKSGEIVPMEVNFNFDDPNLIILPLAFGKRQGREFIWNDLLSLETGSLKLANGRVIEKTLYNRRTRQDEPALFVALTFERREVLDSSNIKPMNLIGVDRGENIPAVIALTDPEGCPLSRFKDSLGNPTHILRIGESYKEKQRTIQAKKEVEQRRAGGYSRKYASKAKNLADDMVRNTARDLLYYAVTQDAMLIFENLSRGFGRQGKRTFMAERQYTRMEDWLTAKLAYEGLSKTYLSKTLAQYTSKTCSNCGFTITSADYDRVLEKLKKTATGWMTTINGKELKVEGQITYYNRRKRQNVVKDLSVELDRLSEESVNNDISSWTKGRSGEALSLLKKRFSHRPVQEKFVCLNCGFETHADEQAALNIARSWLFLRSQEYKKYQTNKTTGNTDKRAFVETWQSFYRKKLKEVWKPAV

SEQ ID NO: 80 - protein, 977 aa, synthetic construct
  REGION 1..977: note = CasX Variant
MQEIKRINKIRRRLVKDSNTKKAGKTGPMKTLLVRVMTPDLRERLENLRKKPENIPQPISNTSRANLNKLLTDYTEMKKAILHVYWEEFQKDPVGLMSRVAQPAPKNIDQRKLIPVKDGNERLTSSGFACSQCCQPLYVYKLEQVNDKGKPHTNYFGRCNVSEHERLILLSPHKPEANDELVTYSLGKFGQRALDFYSIHVTRESNHPVKPLEQIGGNSCASGPVGKALSDACMGAVASFLTKYQDIILEHQKVIKKNEKRLANLKDIASANGLAFPKITLPPQPHTKEGIEAYNNVVAQIVIWVNLNLWQKLKIGRDEAKPLQRLKGFPSFPLVERQANEVDWWDMVCNVKKLINEKKEDGKVFWQNLAGYKRQEALRPYLSSEEDRKKGKKFARYQLGDLLLHLEKKHGEDWGKVYDEAWERIDKKVEGLSKHIKLEEERRSEDAQSKAALTDWLRAKASFVIEGLKEADKDEFSRCELKLQKWYGDLRGKPFAIEAENSILDISGFSKQYNCAFIWQKDGVKKLNLYLIINYFKGGKLRFKKIKPEAFEANRFYTVINKKSGEIVPMEVNFNFDDPNLIILPLAFGKRQGREFIWNDLLSLETGSLKLANGRVIEKTLYNRRTRQDEPALFVALTFERREVLDSSNIKPMNLIGVDRGENIPAVIALTDPEGCPLSRFKDSLGNPTHILRIGESYKEKQRTIQAKKEVEQRRAGGYSRKYASKAKNLADDMVRNTARDLLYYAVTQDAMLIFENLSRGFGRQGKRTFMAERQYTRMEDWLTAKLAYEGLSKTYLSKTLAQYTSKTCSNCGFTITSADYDRVLEKLKKTATGWMTTINGKELKVEGQITYYNRRKRQNVVKDLSVELDRLSEESVNNDISSWTKGRSGEALSLLKKRFSHRPVQEKFVCLNCGFETHADEQAALNIARSWLFLRSQEYKKYQTNKTTGNTDKRAFVETWQSFYRKKLKEVWKPAV

SEQ ID NO: 81 - protein, 977 aa, synthetic construct
  REGION 1..977: note = CasX Variant
MQEIKRINKIRRRLVKDSNTKKAGKTGPMKTLLVRVMTPDLRERLENLRKKPENIPQPISNTSRANLNKLLTDYTEMKKAILHVYWEEFQKDPVGLMSRVAQPAPKNIDQRKLIPVKDGNERLTSSGFACSQCCQPLYVYKLEQVNDKGKPHTNYFGRCNVSEHERLILLSPHKPEANDELVTYSLGKFGQRALDFYSIHVTRESNHPVKPLEQIGGNSCASGPVGKALSDACMGAVASFLTKYQDIILEHQKVIKKNEKRLANLKDIASANGLAFPKITLPPQPHTKEGIEAYNNVVAQIVIWVNLNLWQKLKIGRDEAKPLQRLKGFPSFPLVERQANEVDWWDMVCNVKKLINEKKEDGKVFWQNLAGYKRQEALRPYLSSEEDRKKGKKFARYQLGDLLKHLEKKHGEDWGKVYDEAWERIDKKVEGLSKHIKLEEERRSEDAQSKAALTDWLRAKASFVIEGLKEADKDEFCRCELKLQKWYGDLRGKPFAIEAENSILDISGFSKQYNCAFIWQKDGVKKLNLYLIINYFKGGKLRFKKIKPEAFEANRFYTVINKKSGEIVPMEVNFNFDDPNLIILPLAFGKRQGREFIWNDLLSLETGSLKLANGRVIEKTLYNRRTRQDEPALFVALTFERREVLDSSNIKPMNLIGVDRGENIPAVIALTDPEGCPLSRFKDSLGNPTHILRIGESYKEKQRTIQAKKEVEQRRAGGYSRKYASKAKNLADDMVRNTARDLLYYAVTQDAMLIFENLSRGFGRQGKRTFMAERQYTRMEDWLTAKLAYEGLSKTYLSKTLAQYTSKTCSNCGFTITSADYDRVLEKLKKTATGWMTTINGKELKVEGQITYYNRRKRQNVVKDLSVELDRLSEESVNNDISSWTKGRSGEALSLLKKRFSHRPVQEKFVCLNCGFETHADEQAALNIARSWLFLRSQEYKKYQTNKTTGNTDKRAFVETWQSFYRKKLKEVWKPAV

SEQ ID NO: 82 - protein, 977 aa, synthetic construct
  REGION 1..977: note = CasX Variant
MQEIKRINKIRRRLVKDSNTKKAGKTGPMKTLLVRVMTPDLRERLENLRKKPENIPQPISNTSRANLNKLLTDYTEMKKAILHVYWEEFQKDPVGLMSRVAQPAPKNIDQRKLIPVKDGNERLTSSGFACSQCCQPLYVYKLEQVNDKGKPHTNYFGRCNVSEHERLILLSPHKPEANDELVTYSLGKFGQRALDFYSIHVTRESNHPVKPLEQIGGNSCASGPVGKALSDACMGAVASFLTKYQDIILEHQKVIKKNEKRLANLKDIASANGLAFPKITLPPQPHTKEGIEAYNNVVAQIVIWVNLNLWQKLKIGRDEAKPLQRLKGFPSFPLVERQANEVDWWDMVCNVKKLINEKKEDGKVFWQNLAGYKRQEALRPYLSSENDRKKGKKFARYQLGDLLKHLEKKHGEDWGKVYDEAWERIDKKVEGLSKHIKLEEERRSEDAQSKAALTDWLRAKASFVIEGLKEADKDEFSRCELKLQKWYGDLRGKPFAIEAENSILDISGFSKQYNCAFIWQKDGVKKLNLYLIINYFKGGKLRFKKIKPEAFEANRFYTVINKKSGEIVPMEVNFNFDDPNLIILPLAFGKRQGREFIWNDLLSLETGSLKLANGRVIEKTLYNRRTRQDEPALFVALTFERREVLDSSNIKPMNLIGVDRGENIPAVIALTDPEGCPLSRFKDSLGNPTHILRIGESYKEKQRTIQAKKEVEQRRAGGYSRKYASKAKNLADDMVRNTARDLLYYAVTQDAMLIFENLSRGFGRQGKRTFMAERQYTRMEDWLTAKLAYEGLSKTYLSKTLAQYTSKTCSNCGFTITSADYDRVLEKLKKTATGWMTTINGKELKVEGQITYYNRRKRQNVVKDLSVELDRLSEESVNNDISSWTKGRSGEALSLLKKRFSHRPVQEKFVCLNCGFETHADEQAALNIARSWLFLRSQEYKKYQTNKTTGNTDKRAFVETWQSFYRKKLKEVWKPAV

SEQ ID NO: 83 - protein, 977 aa, synthetic construct
  REGION 1..977: note = CasX Variant
MQEIKRINKIRRRLVKDSNTKKAGKTGPMKTLLVRVMTPDLRERLENLRKKPENIPQPISNTSRANLNKLLTDYTEMKKAILHVYWEEFQKDPVGLMSRVAQPAPKNIDQRKLIPVKDGNERLTSSGFACSQCCQPLYVYKLEQVNDKGKPHTNYFGRCNVSEHERLILLSPHKPEANDELVTYSLGKFGQRALDFYSIHVTRESNHPVKPLEQIGGNSCASGPVGKALSDACMGAVASFLTKYQDIILEHQKVIKKNEKRLANLKDIASANGLAFPKITLPPQPHTKEGIEAYNNVVAQIVIWVNLNLWQKLKIGRDEAKPLQRLKGFPSFPLVERQANEVDWWDMVCNVKKLINEKKEDGKVFWQNLAGYKRQEALRPYLSSEEDRKKGKKFARYQLGDLLLHLEKKHGEDWGKVYDEAWERIDKKVEGLSKHIKLEEERRSEDAQSKAALTDWLRAKASFVIEGLKEADKDEFCRCELKLQKWYGDLRGKPFAIEAENSILDISGFSKQYNCAFIWQKDGVKKLNLYLIINYFKGGKLRFKKIKPEAFEANRFYTVINKKSGEIVPMEVNFNFDDPNLIILPLAFGKRQGREFIWNDLLSLETGSLKLANGRVIEKTLYNRRTRQDEPALFVALTFERREVLDSSNIKPMNLIGVDRGENIPAVIALTDPEGCPLSRFKDSLGNPTHILRIGESYKEKQRTIQAKKEVEQRRAGGYSRKYASKAKNLADDMVRNTARDLLYYAVTQDAMLIFENLSRGFGRQGKRTFMAERQYTRMEDWLTAKLAYEGLSKTLLSKTLAQYTSKTCSNCGFTITSADYDRVLEKLKKTATGWMTTINGKELKVEGQITYYNRRKRQNVVKDLSVELDRLSEESVNNDISSWTKGRSGEALSLLKKRFSHRPVQEKFVCLNCGFETHADEQAALNIARSWLFLRSQEYKKYQTNKTTGNTDKRAFVETWQSFYRKKLKEVWKPAV

SEQ ID NO: 84 - protein, 977 aa, synthetic construct
  REGION 1..977: note = CasX Variant
MQEIKRINKIRRRLVKDSNTKKAGKTGPMKTLLVRVMTPDLRERLENLRKKPENIPQPISNTSRANLNKLLTDYTEMKKAILHVYWEEFQKDPVGLMSRVAQPAPKNIDQRKLIPVKDGNERLTSSGFACSQCCQPLYVYKLEQVNDKGKPHTNYFGRCNVSEHERLILLSPHKPEANDELVTYSLGKFGQRALDFYSIHVTRESNHPVKPLEQIGGNSCASGPVGKALSDACMGAVASFLTKYQDIILEHQKVIKKNEKRLANLKDIASANGLAFPKITLPPQPHTKEGIEAYNNVVAQIVIWVNLNLWQKLKIGRDEAKPLQRLKGFPSFPLVERQANEVDWWDMVCNVKKLINEKKEDGKVFWQNLAGYKRQEALRPYLSSENDRKKGKKFARYQLGDLLLHLEKKHGEDWGKVYDEAWERIDKKVEGLSKHIKLEEERRSEDAQSKAALTDWLRAKASFVIEGLKEADKDEFCRCELKLQKWYGDLRGKPFAIEAENSILDISGFSKQYNCAFIWQKDGVKKLNLYLIINYFKGGKLRFKKIKPEAFEANRFYTVINKKSGEIVPMEVNFNFDDPNLIILPLAFGKRQGREFIWNDLLSLETGSLKLANGRVIEKTLYNRRTRQDEPALFVALTFERREVLDSSNIKPMNLIGVDRGENIPAVIALTDPEGCPLSRFKDSLGNPTHILRIGESYKEKQRTIQAKKEVEQRRAGGYSRKYASKAKNLADDMVRNTARDLLYYAVTQDAMLIFENLSRGFGRQGKRTFMAERQYTRMEDWLTAKLAYEGLSKTLLSKTLAQYTSKTCSNCGFTITSADYDRVLEKLKKTATGWMTTINGKELKVEGQITYYNRRKRQNVVKDLSVELDRLSEESVNNDISSWTKGRSGEALSLLKKRFSHRPVQEKFVCLNCGFETHADEQAALNIARSWLFLRSQEYKKYQTNKTTGNTDKRAFVETWQSFYRKKLKEVWKPAV

SEQ ID NO: 85 - protein, 977 aa, synthetic construct
  REGION 1..977: note = CasX Variant
MQEIKRINKIRRRLVKDSNTKKAGKTGPMKTLLVRVMTPDLRERLENLRKKPENIPQPISNTSRANLNKLLTDYTEMKKAILHVYWEEFQKDPVGLMSRVAQPAPKNIDQRKLIPVKDGNERLTSSGFACSQCCQPLYVYKLEQVNDKGKPHTNYFGRCNVSEHERLILLSPHKPEANDELVTYSLGKFGQRALDFYSIHVTRESNHPVKPLEQIGGNSCASGPVGKALSDACMGAVASFLTKYQDIILEHQKVIKKNEKRLANLKDIASANGLAFPKITLPPQPHTKEGIEAYNNVVAQIVIWVNLNLWQKLKIGRDEAKPLQRLKGFPSFPLVERQANEVDWWDMVCNVKKLINEKKEDGKVFWQNLAGYKRQEALRPYLSSENDRKKGKKFARYQLGDLLKHLEKKHGEDWGKVYDEAWERIDKKVEGLSKHIKLEEERRSEDAQSKAALTDWLRAKASFVIEGLKEADKDEFSRCELKLQKWYGDLRGKPFAIEAENSILDISGFSKQYNCAFIWQKDGVKKLNLYLIINYFKGGKLRFKKIKPEAFEANRFYTVINKKSGEIVPMEVNFNFDDPNLIILPLAFGKRQGREFIWNDLLSLETGSLKLANGRVIEKTLYNRRTRQDEPALFVALTFERREVLDSSNIKPMNLIGVDRGENIPAVIALTDPEGCPLSRFKDSLGNPTHILRIGESYKEKQRTIQAKKEVEQRRAGGYSRKYASKAKNLADDMVRNTARDLLYYAVTQDAMLIFENLSRGFGRQGKRTFMAERQYTRMEDWLTAKLAYEGLSKTLLSKTLAQYTSKTCSNCGFTITSADYDRVLEKLKKTATGWMTTINGKELKVEGQITYYNRRKRQNVVKDLSVELDRLSEESVNNDISSWTKGRSGEALSLLKKRFSHRPVQEKFVCLNCGFETHADEQAALNIARSWLFLRSQEYKKYQTNKTTGNTDKRAFVETWQSFYRKKLKEVWKPAV

SEQ ID NO: 86 - protein, 977 aa, synthetic construct
  REGION 1..977: note = CasX Variant
MQEIKRINKIRRRLVKDSNTKKAGKTGPMKTLLVRVMTPDLRERLENLRKKPENIPQPISNTSRANLNKLLTDYTEMKKAILHVYWEEFQKDPVGLMSRVAQPAPKNIDQRKLIPVKDGNERLTSSGFACSQCCQPLYVYKLEQVNDKGKPHTNYFGRCNVSEHERLILLSPHKPEANDELVTYSLGKFGQRALDFYSIHVTRESNHPVKPLEQIGGNSCASGPVGKALSDACMGAVASFLTKYQDIILEHQKVIKKNEKRLANLKDIASANGLAFPKITLPPQPHTKEGIEAYNNVVAQIVIWVNLNLWQKLKIGRDEAKPLQRLKGFPSFPLVERQANEVDWWDMVCNVKKLINEKKEDGKVFWQNLAGYKRQEALRPYLSSEEDRKKGKKFARYQFGDLLLHLEKKHGEDWGKVYDEAWERIDKKVEGLSKHIKLEEERRSEDAQSKAALTDWLRAKASFVIEGLKEADKDEFCRCELKLQKWYGDLRGKPFAIEAENSILDISGFSKQYNCAFIWQKDGVKKLNLYLIINYFKGGKLRFKKIKPEAFEANRFYTVINKKSGEIVPMEVNFNFDDPNLIILPLAFGKRQGREFIWNDLLSLETGSLKLANGRVIEKTLYNRRTRQDEPALFVALTFERREVLDSSNIKPMNLIGVDRGENIPAVIALTDPEGCPLSRFKDSLGNPTHILRIGESYKEKQRTIQAKKEVEQRRAGGYSRKYASKAKNLADDMVRNTARDLLYYAVTQDAMLIFENLSRGFGRQGKRTFMAERQYTRMEDWLTAKLAYEGLSKTLLSKTLAQYTSKTCSNCGFTITSADYDRVLEKLKKTATGWMTTINGKELKVEGQITYYNRRKRQNVVKDLSVELDRLSEESVNNDISSWTKGRSGEALSLLKKRFSHRPVQEKFVCLNCGFETHADEQAALNIARSWLFLRSQEYKKYQTNKTTGNTDKRAFVETWQSFYRKKLKEVWKPAV

SEQ ID NO: 87 - protein, 977 aa, synthetic construct
  REGION 1..977: note = CasX Variant
MQEIKRINKIRRRLVKDSNTKKAGKTGPMKTLLVRVMTPDLRERLENLRKKPENIPQPISNTSRANLNKLLTDYTEMKKAILHVYWEEFQKDPVGLMSRVAQPAPKNIDQRKLIPVKDGNERLTSSGFACSQCCQPLYVYKLEQVNDKGKPHTNYFGRCNVSEHERLILLSPHKPEANDELVTYSLGKFGQRALDFYSIHVTRESNHPVKPLEQIGGNSCASGPVGKALSDACMGAVASFLTKYQDIILEHQKVIKKNEKRLANLKDIASANGLAFPKITLPPQPHTKEGIEAYNNVVAQIVIWVNLNLWQKLKIGRDEAKPLQRLKGFPSFPLVERQANEVDWWDMVCNVKKLINEKKEDGKVFWQNLAGYKRQEALRPYLSSEEDRKKGKKFARYQFGDLLKHLEKKHGEDWGKVYDEAWERIDKKVEGLSKHIKLEEERRSEDAQSKAALTDWLRAKASFVIEGLKEADKDEFCRCELKLQKWYGDLRGKPFAIEAENSILDISGFSKQYNCAFIWQKDGVKKLNLYLIINYFKGGKLRFKKIKPEAFEANRFYTVINKKSGEIVPMEVNFNFDDPNLIILPLAFGKRQGREFIWNDLLSLETGSLKLANGRVIEKTLYNRRTRQDEPALFVALTFERREVLDSSNIKPMNLIGVDRGENIPAVIALTDPEGCPLSRFKDSLGNPTHILRIGESYKEKQRTIQAKKEVEQRRAGGYSRKYASKAKNLADDMVRNTARDLLYYAVTQDAMLIFENLSRGFGRQGKRTFMAERQYTRMEDWLTAKLAYEGLSKTLLSKTLAQYTSKTCSNCGFTITSADYDRVLEKLKKTATGWMTTINGKELKVEGQITYYNRRKRQNVVKDLSVELDRLSEESVNNDISSWTKGRSGEALSLLKKRFSHRPVQEKFVCLNCGFETHADEQAALNIARSWLFLRSQEYKKYQTNKTTGNTDKRAFVETWQSFYRKKLKEVWKPAV

SEQ ID NO: 88 - protein, 977 aa, synthetic construct
  REGION 1..977: note = CasX Variant
MQEIKRINKIRRRLVKDSNTKKAGKTGPMKTLLVRVMTPDLRERLENLRKKPENIPQPISNTSRANLNKLLTDYTEMKKAILHVYWEEFQKDPVGLMSRVAQPAPKNIDQRKLIPVKDGNERLTSSGFACSQCCQPLYVYKLEQVNDKGKPHTNYFGRCNVSEHERLILLSPHKPEANDELVTYSLGKFGQRALDFYSIHVTRESNHPVKPLEQIGGNSCASGPVGKALSDACMGAVASFLTKYQDIILEHQKVIKKNEKRLANLKDIASANGLAFPKITLPPQPHTKEGIEAYNNVVAQIVIWVNLNLWQKLKIGRDEAKPLQRLKGFPSFPLVERQANEVDWWDMVCNVKKLINEKKEDGKVFWQNLAGYKRQEALRPYLSSENDRKKGKKFARYQFGDLLLHLEKKHGEDWGKVYDEAWERIDKKVEGLSKHIKLEEERRSEDAQSKAALTDWLRAKASFVIEGLKEADKDEFCRCELKLQKWYGDLRGKPFAIEAENSILDISGFSKQYNCAFIWQKDGVKKLNLYLIINYFKGGKLRFKKIKPEAFEANRFYTVINKKSGEIVPMEVNFNFDDPNLIILPLAFGKRQGREFIWNDLLSLETGSLKLANGRVIEKTLYNRRTRQDEPALFVALTFERREVLDSSNIKPMNLIGVDRGENIPAVIALTDPEGCPLSRFKDSLGNPTHILRIGESYKEKQRTIQAKKEVEQRRAGGYSRKYASKAKNLADDMVRNTARDLLYYAVTQDAMLIFENLSRGFGRQGKRTFMAERQYTRMEDWLTAKLAYEGLSKTLLSKTLAQYTSKTCSNCGFTITSADYDRVLEKLKKTATGWMTTINGKELKVEGQITYYNRRKRQNVVKDLSVELDRLSEESVNNDISSWTKGRSGEALSLLKKRFSHRPVQEKFVCLNCGFETHADEQAALNIARSWLFLRSQEYKKYQTNKTTGNTDKRAFVETWQSFYRKKLKEVWKPAV

SEQ ID NO: 89 - protein, 977 aa, synthetic construct
  REGION 1..977: note = CasX Variant
MQEIKRINKIRRRLVKDSNTKKAGKTGPMKTLLVRVMTPDLRERLENLRKKPENIPQPISNTSRANLNKLLTDYTEMKKAILHVYWEEFQKDPVGLMSRVAQPAPKNIDQRKLIPVKDGNERLTSSGFACSQCCQPLYVYKLEQVNDKGKPHTNYFGRCNVSEHERLILLSPHKPEANDELVTYSLGKFGQRALDFYSIHVTRESNHPVKPLEQIGGNSCASGPVGKALSDACMGAVASFLTKYQDIILEHQKVIKKNEKRLANLKDIASANGLAFPKITLPPQPHTKEGIEAYNNVVAQIVIWVNLNLWQKLKIGRDEAKPLQRLKGFPSFPLVERQANEVDWWDMVCNVKKLINEKKEDGKVFWQNLAGYKRQEALRPYLSSENDRKKGKKFARYQFGDLLKHLEKKHGEDWGKVYDEAWERIDKKVEGLSKHIKLEEERRSEDAQSKAALTDWLRAKASFVIEGLKEADKDEFSRCELKLQKWYGDLRGKPFAIEAENSILDISGFSKQYNCAFIWQKDGVKKLNLYLIINYFKGGKLRFKKIKPEAFEANRFYTVINKKSGEIVPMEVNFNFDDPNLIILPLAFGKRQGREFIWNDLLSLETGSLKLANGRVIEKTLYNRRTRQDEPALFVALTFERREVLDSSNIKPMNLIGVDRGENIPAVIALTDPEGCPLSRFKDSLGNPTHILRIGESYKEKQRTIQAKKEVEQRRAGGYSRKYASKAKNLADDMVRNTARDLLYYAVTQDAMLIFENLSRGFGRQGKRTFMAERQYTRMEDWLTAKLAYEGLSKTLLSKTLAQYTSKTCSNCGFTITSADYDRVLEKLKKTATGWMTTINGKELKVEGQITYYNRRKRQNVVKDLSVELDRLSEESVNNDISSWTKGRSGEALSLLKKRFSHRPVQEKFVCLNCGFETHADEQAALNIARSWLFLRSQEYKKYQTNKTTGNTDKRAFVETWQSFYRKKLKEVWKPAV

SEQ ID NO: 90 - protein, 977 aa, synthetic construct
  REGION 1..977: note = CasX Variant
MQEIKRINKIRRRLVKDSNTKKAGKTGPMKTLLVRVMTPDLRERLENLRKKPENIPQPISNTSRANLNKLLTDYTEMKKAILHVYWEEFQKDPVGLMSRVAQPAPKNIDQRKLIPVKDGNERLTSSGFACSQCCQPLYVYKLEQVNDKGKPHTNYFGRCNVSEHERLILLSPHKPEANDELVTYSLGKFGQRALDFYSIHVTRESNHPVKPLEQIGGNSCASGPVGKALSDACMGAVASFLTKYQDIILEHQKVIKKNEKRLANLKDIASANGLAFPKITLPPQPHTKEGIEAYNNVVAQIVIWVNLNLWQKLKIGRDEAKPLQRLKGFPSFPLVERQANEVDWWDMVCNVKKLINEKKEDGKVFWQNLAGYKRQEALRPYLSSENDRKKGKKFARYQFGDLLLHLEKKHGEDWGKVYDEAWERIDKKVEGLSKHIKLEEERRSEDAQSKAALTDWLRAKASFVIEGLKEADKDEFCRCELKLQKWYGDLRGKPFAIEAENSILDISGFSKQYNCAFIWQKDGVKKLNLYLIINYFKGGKLRFKKIKPEAFEANRFYTVINKKSGEIVPMEVNFNFDDPNLIILPLAFGKRQGREFIWNDLLSLETGSLKLANGRVIEKTLYNRRTRQDEPALFVALTFERREVLDSSNIKPMNLIGIDRGENIPAVIALTDPEGCPLSRFKDSLGNPTHILRIGESYKEKQRTIQAKKEVEQRRAGGYSRKYASKAKNLADDMVRNTARDLLYYAVTQDAMLIFENLSRGFGRQGKRTFMAERQYTRMEDWLTAKLAYEGLSKTYLSKTLAQYTSKTCSNCGFTITSADYDRVLEKLKKTATGWMTTINGKELKVEGQITYYNRRKRQNVVKDLSVELDRLSEESVNNDISSWTKGRSGEALSLLKKRFSHRPVQEKFVCLNCGFETHADEQAALNIARSWLFLRSQEYKKYQTNKTTGNTDKRAFVETWQSFYRKKLKEVWKPAV

SEQ ID NO: 91 - protein, 977 aa, synthetic construct
  REGION 1..977: note = CasX Variant
MQEIKRINKIRRRLVKDSNTKKAGKTGPMKTLLVRVMTPDLRERLENLRKKPENIPQPISNTSRANLNKLLTDYTEMKKAILHVYWEEFQKDPVGLMSRVAQPAPKNIDQRKLIPVKDGNERLTSSGFACSQCCQPLYVYKLEQVNDKGKPHTNYFGRCNVSEHERLILLSPHKPEANDELVTYSLGKFGQRALDFYSIHVTRESNHPVKPLEQIGGNSCASGPVGKALSDACMGAVASFLTKYQDIILEHQKVIKKNEKRLANLKDIASANGLAFPKITLPPQPHTKEGIEAYNNVVAQIVIWVNLNLWQKLKIGRDEAKPLQRLKGFPSFPLVERQANEVDWWDMVCNVKKLINEKKEDGKVFWQNLAGYKRQEALRPYLSSENDRKKGKKFARYQFGDLLKHLEKKHGEDWGKVYDEAWERIDKKVEGLSKHIKLEEERRSEDAQSKAALTDWLRAKASFVIEGLKEADKDEFCRCELKLQKWYGDLRGKPFAIEAENSILDISGFSKQYNCAFIWQKDGVKKLNLYLIINYFKGGKLRFKKIKPEAFEANRFYTVINKKSGEIVPMEVNFNFDDPNLIILPLAFGKRQGREFIWNDLLSLETGSLKLANGRVIEKTLYNRRTRQDEPALFVALTFERREVLDSSNIKPMNLIGIDRGENIPAVIALTDPEGCPLSRFKDSLGNPTHILRIGESYKEKQRTIQAKKEVEQRRAGGYSRKYASKAKNLADDMVRNTARDLLYYAVTQDAMLIFENLSRGFGRQGKRTFMAERQYTRMEDWLTAKLAYEGLSKTYLSKTLAQYTSKTCSNCGFTITSADYDRVLEKLKKTATGWMTTINGKELKVEGQITYYNRRKRQNVVKDLSVELDRLSEESVNNDISSWTKGRSGEALSLLKKRFSHRPVQEKFVCLNCGFETHADEQAALNIARSWLFLRSQEYKKYQTNKTTGNTDKRAFVETWQSFYRKKLKEVWKPAV

SEQ ID NO: 92 - protein, 977 aa, synthetic construct
  REGION 1..977: note = CasX Variant
MQEIKRINKIRRRLVKDSNTKKAGKTGPMKTLLVRVMTPDLRERLENLRKKPENIPQPISNTSRANLNKLLTDYTEMKKAILHVYWEEFQKDPVGLMSRVAQPAPKNIDQRKLIPVKDGNERLTSSGFACSQCCQPLYVYKLEQVNDKGKPHTNYFGRCNVSEHERLILLSPHKPEANDELVTYSLGKFGQRALDFYSIHVTRESNHPVKPLEQIGGNSCASGPVGKALSDACMGAVASFLTKYQDIILEHQKVIKKNEKRLANLKDIASANGLAFPKITLPPQPHTKEGIEAYNNVVAQIVIWVNLNLWQKLKIGRDEAKPLQRLKGFPSFPLVERQANEVDWWDMVCNVKKLINEKKEDGKVFWQNLAGYKRQEALRPYLSSPEDRKKGKKFARYQFGDLLLHLEKKHGEDWGKVYDEAWERIDKKVEGLSKHIKLEEERRSEDAQSKAALTDWLRAKASFVIEGLKEADKDEFCRCELKLQKWYGDLRGKPFAIEAENSILDISGFSKQYNCAFIWQKDGVKKLNLYLIINYFKGGKLRFKKIKPEAFEANRFYTVINKKSGEIVPMEVNFNFDDPNLIILPLAFGKRQGREFIWNDLLSLETGSLKLANGRVIEKTLYNRRTRQDEPALFVALTFERREVLDSSNIKPMNLIGIDRGENIPAVIALTDPEGCPLSRFKDSLGNPTHILRIGESYKEKQRTIQAKKEVEQRRAGGYSRKYASKAKNLANDMVRNTARDLLYYAVTQDAMLIFENLSRGFGRQGKRTFMAERQYTRMEDWLTAKLAYEGLSKTYLSKTLAQYTSKTCSNCGFTITSADYDRVLEKLKKTATGWMTTINGKELKVEGQITYYNRRKRQNVVKDLSVELDRLSEESVNNDISSWTKGRSGEALSLLKKRFSHRPVQEKFVCLNCGFETHADEQAALNIARSWLFLRSQEYKKYQTNKTTGNTDKRAFVETWQSFYRKKLKEVWKPAV

SEQ ID NO: 93 - protein, 977 aa, synthetic construct
  REGION 1..977: note = CasX Variant
MQEIKRINKIRRRLVKDSNTKKAGKTGPMKTLLVRVMTPDLRERLENLRKKPENIPQPISNTSRANLNKLLTDYTEMKKAILHVYWEEFQKDPVGLMSRVAQPAPKNIDQRKLIPVKDGNERLTSSGFACSQCCQPLYVYKLEQVNDKGKPHTNYFGRCNVSEHERLILLSPHKPEANDELVTYSLGKFGQRALDFYSIHVTRESNHPVKPLEQIGGNSCASGPVGKALSDACMGAVASFLTKYQDIILEHQKVIKKNEKRLANLKDIASANGLAFPKITLPPQPHTKEGIEAYNNVVAQIVIWVNLNLWQKLKIGRDEAKPLQRLKGFPSFPLVERQANEVDWWDMVCNVKKLINEKKEDGKVFWQNLAGYKRQEALRPYLSSPEDRKKGKKFARYQFGDLLLHLEKKHGEDWGKVYDEAWERIDKKVEGLSKHIKLEEERRSEDAQSKAALTDWLRAKASFVIEGLKEADKDEFCRCELKLQKWYGDLRGKPFAIEAENSILDISGFSKQYNCAFIWQKDGVKKLNLYLIINYFKGGKLRFKKIKPEAFEANRFYTVINKKSGEIVPMEVNFNFDDPNLIILPLAFGKRQGREFIWNDLLSLETGSLKLANGRVIEKTLYNRRTRQDEPALFVALTFERREVLDSSNIKPMNLIGVDRGENIPAVIALTDPEGCPLSRFKDSLGNPTHILRIGESYKEKQRTIQAKKEVEQRRAGGYSRKYASKAKNLANDMVRNTARDLLYYAVTQDAMLIFENLSRGFGRQGKRTFMAERQYTRMEDWLTAKLAYEGLSKTYLSKTLAQYTSKTCSNCGFTITSADYDRVLEKLKKTATGWMTTINGKELKVEGQITYYNRRKRQNVVKDLSVELDRLSEESVNNDISSWTKGRSGEALSLLKKRFSHRPVQEKFVCLNCGFETHADEQAALNIARSWLFLRSQEYKKYQTNKTTGNTDKRAFVETWQSFYRKKLKEVWKPAV

SEQ ID NO: 94 - protein, 977 aa, synthetic construct
  REGION 1..977: note = CasX Variant
MQEIKRINKIRRRLVKDSNTKKAGKTGPMKTLLVRVMTPDLRERLENLRKKPENIPQPISNTSRANLNKLLTDYTEMKKAILHVYWEEFQKDPVGLMSRVAQPAPKNIDQRKLIPVKDGNERLTSSGFACSQCCQPLYVYKLEQVNDKGKPHTNYFGRCNVSEHERLILLSPHKPEANDELVTYSLGKFGQRALDFYSIHVTRESNHPVKPLEQIGGNSCASGPVGKALSDACMGAVASFLTKYQDIILEHQKVIKKNEKRLANLKDIASANGLAFPKITLPPQPHTKEGIEAYNNVVAQIVIWVNLNLWQKLKIGRDEAKPLQRLKGFPSFPLVERQANEVDWWDMVCNVKKLINEKKEDGKVFWQNLAGYKRQEALRPYLSSPEDRKKGKKFARYQLGDLLLHLEKKHGEDWGKVYDEAWERIDKKVEGLSKHIKLEEERRSEDAQSKAALTDWLRAKASFVIEGLKEADKDEFCRCELKLQKWYGDLRGKPFAIEAENSILDISGFSKQYNCAFIWQKDGVKKLNLYLIINYFKGGKLRFKKIKPEAFEANRFYTVINKKSGEIVPMEVNFNFDDPNLIILPLAFGKRQGREFIWNDLLSLETGSLKLANGRVIEKTLYNRRTRQDEPALFVALTFERREVLDSSNIKPMNLIGVDRGENIPAVIALTDPEGCPLSRFKDSLGNPTHILRIGESYKEKQRTIQAKKEVEQRRAGGYSRKYASKAKNLANDMVRNTARDLLYYAVTQDAMLIFENLSRGFGRQGKRTFMAERQYTRMEDWLTAKLAYEGLSKTYLSKTLAQYTSKTCSNCGFTITSADYDRVLEKLKKTATGWMTTINGKELKVEGQITYYNRRKRQNVVKDLSVELDRLSEESVNNDISSWTKGRSGEALSLLKKRFSHRPVQEKFVCLNCGFETHADEQAALNIARSWLFLRSQEYKKYQTNKTTGNTDKRAFVETWQSFYRKKLKEVWKPAV

SEQ ID NO: 95 - protein, 977 aa, synthetic construct
  REGION 1..977: note = CasX Variant
MQEIKRINKIRRRLVKDSNTKKAGKTGPMKTLLVRVMTPDLRERLENLRKKPENIPQPISNTSRANLNKLLTDYTEMKKAILHVYWEEFQKDPVGLMSRVAQPAPKNIDQRKLIPVKDGNERLTSSGFACSQCCQPLYVYKLEQVNDKGKPHTNYFGRCNVSEHERLILLSPHKPEANDELVTYSLGKFGQRALDFYSIHVTRESNHPVKPLEQIGGNSCASGPVGKALSDACMGAVASFLTKYQDIILEHQKVIKKNEKRLANLKDIASANGLAFPKITLPPQPHTKEGIEAYNNVVAQIVIWVNLNLWQKLKIGRDEAKPLQRLKGFPSFPLVERQANEVDWWDMVCNVKKLINEKKEDGKVFWQNLAGYKRQEALRPYLSSPNDRKKGKKFARYQFGDLLLHLEKKHGEDWGKVYDEAWERIDKKVEGLSKHIKLEEERRSEDAQSKAALTDWLRAKASFVIEGLKEADKDEFCRCELKLQKWYGDLRGKPFAIEAENSILDISGFSKQYNCAFIWQKDGVKKLNLYLIINYFKGGKLRFKKIKPEAFEANRFYTVINKKSGEIVPMEVNFNFDDPNLIILPLAFGKRQGREFIWNDLLSLETGSLKLANGRVIEKTLYNRRTRQDEPALFVALTFERREVLDSSNIKPMNLIGVDRGENIPAVIALTDPEGCPLSRFKDSLGNPTHILRIGESYKEKQRTIQAKKEVEQRRAGGYSRKYASKAKNLANDMVRNTARDLLYYAVTQDAMLIFENLSRGFGRQGKRTFMAERQYTRMEDWLTAKLAYEGLSKTYLSKTLAQYTSKTCSNCGFTITSADYDRVLEKLKKTATGWMTTINGKELKVEGQITYYNRRKRQNVVKDLSVELDRLSEESVNNDISSWTKGRSGEALSLLKKRFSHRPVQEKFVCLNCGFETHADEQAALNIARSWLFLRSQEYKKYQTNKTTGNTDKRAFVETWQSFYRKKLKEVWKPAV

SEQ ID NO: 96 - protein, 977 aa, synthetic construct
  REGION 1..977: note = CasX Variant
MQEIKRINKIRRRLVKDSNTKKAGKTGPMKTLLVRVMTPDLRERLENLRKKPENIPQPISNTSRANLNKLLTDYTEMKKAILHVYWEEFQKDPVGLMSRVAQPAPKNIDQRKLIPVKDGNERLTSSGFACSQCCQPLYVYKLEQVNDKGKPHTNYFGRCNVSEHERLILLSPHKPEANDELVTYSLGKFGQRALDFYSIHVTRESNHPVKPLEQIGGNSCASGPVGKALSDACMGAVASFLTKYQDIILEHQKVIKKNEKRLANLKDIASANGLAFPKITLPPQPHTKEGIEAYNNVVAQIVIWVNLNLWQKLKIGRDEAKPLQRLKGFPSFPLVERQANEVDWWDMVCNVKKLINEKKEDGKVFWQNLAGYKRQEALRPYLSSPEDRKKGKKFARYQFGDLLKHLEKKHGEDWGKVYDEAWERIDKKVEGLSKHIKLEEERRSEDAQSKAALTDWLRAKASFVIEGLKEADKDEFCRCELKLQKWYGDLRGKPFAIEAENSILDISGFSKQYNCAFIWQKDGVKKLNLYLIINYFKGGKLRFKKIKPEAFEANRFYTVINKKSGEIVPMEVNFNFDDPNLIILPLAFGKRQGREFIWNDLLSLETGSLKLANGRVIEKTLYNRRTRQDEPALFVALTFERREVLDSSNIKPMNLIGVDRGENIPAVIALTDPEGCPLSRFKDSLGNPTHILRIGESYKEKQRTIQAKKEVEQRRAGGYSRKYASKAKNLANDMVRNTARDLLYYAVTQDAMLIFENLSRGFGRQGKRTFMAERQYTRMEDWLTAKLAYEGLSKTYLSKTLAQYTSKTCSNCGFTITSADYDRVLEKLKKTATGWMTTINGKELKVEGQITYYNRRKRQNVVKDLSVELDRLSEESVNNDISSWTKGRSGEALSLLKKRFSHRPVQEKFVCLNCGFETHADEQAALNIARSWLFLRSQEYKKYQTNKTTGNTDKRAFVETWQSFYRKKLKEVWKPAV

SEQ ID NO: 97 - protein, 977 aa, synthetic construct
  REGION 1..977: note = CasX Variant
MQEIKRINKIRRRLVKDSNTKKAGKTGPMKTLLVRVMTPDLRERLENLRKKPENIPQPISNTSRANLNKLLTDYTEMKKAILHVYWEEFQKDPVGLMSRVAQPAPKNIDQRKLIPVKDGNERLTSSGFACSQCCQPLYVYKLEQVNDKGKPHTNYFGRCNVSEHERLILLSPHKPEANDELVTYSLGKFGQRALDFYSIHVTRESNHPVKPLEQIGGNSCASGPVGKALSDACMGAVASFLTKYQDIILEHKKVIKKNEKRLANLKDIASANGLAFPKITLPPQPHTKEGIEAYNNVVAQIVIWVNLNLWQKLKIGRDEAKPLQRLKGFPSFPLVERQANEVDWWDMVCNVKKLINEKKEDGKVFWQNLAGYKRQEALRPYLSSPEDRKKGKKFARYQFGDLLLHLEKKHGEDWGKVYDEAWERIDKKVEGLSKHIKLEEERRSEDAQSKAALTDWLRAKASFVIEGLKEADKDEFCRCELKLQKWYGDLRGKPFAIEAENSILDISGFSKQYNCAFIWQKDGVKKLNLYLIINYFKGGKLRFKKIKPEAFEANRFYTVINKKSGEIVPMEVNFNFDDPNLIILPLAFGKRQGREFIWNDLLSLETGSLKLANGRVIEKPLYNRRTRQDEPALFVALTFERREVLDSSNIKPMNLIGIDRGENIPAVIALTDPEGCPLSRFKDSLGNPTHILRIGESYKEKQRTIQAKKEVEQRRAGGYSRKYASKAKNLADDMVRNTARDLLYYAVTQDAMLIFENLSRGFGRQGKRTFMAERQYTRMEDWLTAKLAYEGLSKTYLSKTLAQYTSKTCSNCGFTITSADYDRVLEKLKKTATGWMTTINGKELKVEGQITYYNRRKRQNVVKDLSVELDRLSEESVNNDISSWTKGRSGEALSLLKKRFSHRPVQEKFVCLNCGFETHADEQAALNIARSWLFLRSQEYKKYQTNKTTGNTDKRAFVETWQSFYRKKLKEVWKPAV

SEQ ID NO: 98 - protein, 977 aa, synthetic construct
  REGION 1..977: note = CasX Variant
MQEIKRINKIRRRLVKDSNTKKAGKTGPMKTLLVRVMTPDLRERLENLRKKPENIPQPISNTSRANLNKLLTDYTEMKKAILHVYWEEFQKDPVGLMSRVAQPAPKNIDQRKLIPVKDGNERLTSSGFACSQCCQPLYVYKLEQVNDKGKPHTNYFGRCNVSEHERLILLSPHKPEANDELVTYSLGKFGQRALDFYSIHVTRESNHPVKPLEQIGGNSCASGPVGKALSDACMGAVASFLTKYQDIILEHKKVIKKNEKRLANLKDIASANGLAFPKITLPPQPHTKEGIEAYNNVVAQIVIWVNLNLWQKLKIGRDEAKPLQRLKGFPSFPLVERQANEVDWWDMVCNVKKLINEKKEDGKVFWQNLAGYKRQEALRPYLSSPEDRKKGKKFARYQFGDLLLHLEKKHGEDWGKVYDEAWERIDKKVEGLSKHIKLEEERRSEDAQSKAALTDWLRAKASFVIEGLKEADKDEFCRCELKLQKWYGDLRGKPFAIEAENSILDISGFSKQYNCAFIWQKDGVKKLNLYLIINYFKGGKLRFKKIKPEAFEANRFYTVINKKSGEIVPMEVNFNFDDPNLIILPLAFGKRQGREFIWNDLLSLETGSLKLANGRVIEKPLYNRRTRQDEPALFVALTFERREVLDSSNIKPMNLIGVDRGENIPAVIALTDPEGCPLSRFKDSLGNPTHILRIGESYKEKQRTIQAKKEVEQRRAGGYSRKYASKAKNLADDMVRNTARDLLYYAVTQDAMLIFENLSRGFGRQGKRTFMAERQYTRMEDWLTAKLAYEGLSKTYLSKTLAQYTSKTCSNCGFTITSADYDRVLEKLKKTATGWMTTINGKELKVEGQITYYNRRKRQNVVKDLSVELDRLSEESVNNDISSWTKGRSGEALSLLKKRFSHRPVQEKFVCLNCGFETHADEQAALNIARSWLFLRSQEYKKYQTNKTTGNTDKRAFVETWQSFYRKKLKEVWKPAV

SEQ ID NO: 99 - protein, 977 aa, synthetic construct
  REGION 1..977: note = CasX Variant
MQEIKRINKIRRRLVKDSNTKKAGKTGPMKTLLVRVMTPDLRERLENLRKKPENIPQPISNTSRANLNKLLTDYTEMKKAILHVYWEEFQKDPVGLMSRVAQPAPKNIDQRKLIPVKDGNERLTSSGFACSQCCQPLYVYKLEQVNDKGKPHTNYFGRCNVSEHERLILLSPHKPEANDELVTYSLGKFGQRALDFYSIHVTRESNHPVKPLEQIGGNSCASGPVGKALSDACMGAVASFLTKYQDIILEHKKVIKKNEKRLANLKDIASANGLAFPKITLPPQPHTKEGIEAYNNVVAQIVIWVNLNLWQKLKIGRDEAKPLQRLKGFPSFPLVERQANEVDWWDMVCNVKKLINEKKEDGKVFWQNLAGYKRQEALRPYLSSPNDRKKGKKFARYQFGDLLLHLEKKHGEDWGKVYDEAWERIDKKVEGLSKHIKLEEERRSEDAQSKAALTDWLRAKASFVIEGLKEADKDEFCRCELKLQKWYGDLRGKPFAIEAENSILDISGFSKQYNCAFIWQKDGVKKLNLYLIINYFKGGKLRFKKIKPEAFEANRFYTVINKKSGEIVPMEVNFNFDDPNLIILPLAFGKRQGREFIWNDLLSLETGSLKLANGRVIEKPLYNRRTRQDEPALFVALTFERREVLDSSNIKPMNLIGVDRGENIPAVIALTDPEGCPLSRFKDSLGNPTHILRIGESYKEKQRTIQAKKEVEQRRAGGYSRKYASKAKNLADDMVRNTARDLLYYAVTQDAMLIFENLSRGFGRQGKRTFMAERQYTRMEDWLTAKLAYEGLSKTYLSKTLAQYTSKTCSNCGFTITSADYDRVLEKLKKTATGWMTTINGKELKVEGQITYYNRRKRQNVVKDLSVELDRLSEESVNNDISSWTKGRSGEALSLLKKRFSHRPVQEKFVCLNCGFETHADEQAALNIARSWLFLRSQEYKKYQTNKTTGNTDKRAFVETWQSFYRKKLKEVWKPAV

SEQ ID NO: 100 - protein, 154 aa, Homo sapiens [sequence omitted]

SEQ ID NO: 101 - protein, 977 aa, synthetic construct
  REGION 1..977: note = CasX Variant
MQEIKRINKIRRRLVKDSNTKKAGKTGPMKTLLVRVMTPDLRERLENLRKKPENIPQPISNTSRANLNKLLTDYTEMKKAILHVYWEEFQKDPVGLMSRVAQPAPKNIDQRKLIPVKDGNERLTSSGFACSQCCQPLYVYKLEQVNDKGKPHTNYFGRCNVSEHERLILLSPHKPEANDELVTYSLGKFGQRALDFYSIHVTRESNHPVKPLEQIGGNSCASGPVGKALSDACMGAVASFLTKYQDIILEHKKVIKKNEKRLANLKDIASANGLAFPKITLPPQPHTKEGIEAYNNVVAQIVIWVNLNLWQKLKIGRDEAKPLQRLKGFPSFPLVERQANEVDWWDMVCNVKKLINEKKEDGKVFWQNLAGYKRQEALRPYLSSPEDRKKGKKFARYQLGDLLLHLEKKHGEDWGKVYDEAWERIDKKVEGLSKHIKLEEERRSEDAQSKAALTDWLRAKASFVIEGLKEADKDEFCRCELKLQKWYGDLRGKPFAIEAENSILDISGFSKQYNCAFIWQKDGVKKLNLYLIINYFKGGKLRFKKIKPEAFEANRFYTVINKKSGEIVPMEVNFNFDDPNLIILPLAFGKRQGREFIWNDLLSLETGSLKLANGRVIEKPLYNRRTRQDEPALFVALTFERREVLDSSNIKPMNLIGVDRGENIPAVIALTDPEGCPLSRFKDSLGNPTHILRIGESYKEKQRTIQAKKEVEQRRAGGYSRKYASKAKNLADDMVRNTARDLLYYAVTQDAMLIFENLSRGFGRQGKRTFMAERQYTRMEDWLTAKLAYEGLSKTYLSKTLAQYTSKTCSNCGFTITSADYDRVLEKLKKTATGWMTTINGKELKVEGQITYYNRRKRQNVVKDLSVELDRLSEESVNNDISSWTKGRSGEALSLLKKRFSHRPVQEKFVCLNCGFETHADEQAALNIARSWLFLRSQEYKKYQTNKTTGNTDKRAFVETWQSFYRKKLKEVWKPAV

SEQ ID NO: 102 - protein, 977 aa, synthetic construct
  REGION 1..977: note = CasX Variant
MQEIKRINKIRRRLVKDSNTKKAGKTGPMKTLLVRVMTPDLRERLENLRKKPENIPQPISNTSRANLNKLLTDYTEMKKAILHVYWEEFQKDPVGLMSRVAQPAPKNIDQRKLIPVKDGNERLTSSGFACSQCCQPLYVYKLEQVNDKGKPHTNYFGRCNVSEHERLILLSPHKPEANDELVTYSLGKFGQRALDFYSIHVTRESNHPVKPLEQIGGNSCASGPVGKALSDACMGAVASFLTKYQDIILEHKKVIKKNEKRLANLKDIASANGLAFPKITLPPQPHTKEGIEAYNNVVAQIVIWVNLNLWQKLKIGRDEAKPLQRLKGFPSFPLVERQANEVDWWDMVCNVKKLINEKKEDGKVFWQNLAGYKRQEALRPYLSSPEDRKKGKKFARYQFGDLLKHLEKKHGEDWGKVYDEAWERIDKKVEGLSKHIKLEEERRSEDAQSKAALTDWLRAKASFVIEGLKEADKDEFCRCELKLQKWYGDLRGKPFAIEAENSILDISGFSKQYNCAFIWQKDGVKKLNLYLIINYFKGGKLRFKKIKPEAFEANRFYTVINKKSGEIVPMEVNFNFDDPNLIILPLAFGKRQGREFIWNDLLSLETGSLKLANGRVIEKPLYNRRTRQDEPALFVALTFERREVLDSSNIKPMNLIGVDRGENIPAVIALTDPEGCPLSRFKDSLGNPTHILRIGESYKEKQRTIQAKKEVEQRRAGGYSRKYASKAKNLADDMVRNTARDLLYYAVTQDAMLIFENLSRGFGRQGKRTFMAERQYTRMEDWLTAKLAYEGLSKTYLSKTLAQYTSKTCSNCGFTITSADYDRVLEKLKKTATGWMTTINGKELKVEGQITYYNRRKRQNVVKDLSVELDRLSEESVNNDISSWTKGRSGEALSLLKKRFSHRPVQEKFVCLNCGFETHADEQAALNIARSWLFLRSQEYKKYQTNKTTGNTDKRAFVETWQSFYRKKLKEVWKPAV

SEQ ID NO: 103 - protein, 977 aa, synthetic construct
  REGION 1..977: note = CasX Variant
MQEIKRINKIRRRLVKDSNTKKAGKTGPMKTLLVRVMTPDLRERLENLRKKPENIPQPISNTSRANLNKLLTDYTEMKKAILHVYWEEFQKDPVGLMSRVAQPAPKNIDQRKLIPVKDGNERLTSSGFACSQCCQPLYVYKLEQVNDKGKPHTNYFGRCNVSEHERLILLSPHKPEANDELVTYSLGKFGQRALDFYSIHVTRESNHPVKPLEQIGGNSCASGPVGKALSDACMGAVASFLTKYQDIILEHQKVIKKNEKRLANLKDIASANGLAFPKITLPPQPHTKEGIEAYNNVVAQIVIWVNLNLWQKLKIGRDEAKPLQRLKGFPSFPLVERQANEVDWWDMVCNVKKLINEKKEDGKVFWQNLAGYKRQEALRPYLSSENDRKKGKKFARYQFGDLLLHLEKKHGEDWGKVYDEAWERIDKKVEGLSKHIKLEEERRSEDAQSKAALTDWLRAKASFVIEGLKEADKDEFCRCELKLQKWYGDLRGKPFAIEAENSILDISGFSKQYNCAFIWQKDGVKKLNLYLIINYFKGGKLRFKKIKPEAFEANRFYTVINKKSGEIVPMEVNFNFDDPNLIILPLAFGKRQGREFIWNDLLSLETGSLKLANGRVIEKPLYNRRTRQDEPALFVALTFERREVLDSSNIKPMNLIGVDRGENIPAVIALTDPEGCPLSRFKDSLGNPTHILRIGESYKEKQRTIQAKKEVEQRRAGGYSRKYASKAKNLADDMVRNTARDLLYYAVTQDAMLIFENLSRGFGRQGKRTFMAERQYTRMEDWLTAKLAYEGLSKTYLSKTLAQYTSKTCSNCGFTITSADYDRVLEKLKKTATGWMTTINGKELKVEGQITYYNRRKRQNVVKDLSVELDRLSEESVNNDISSWTKGRSGEALSLLKKRFSHRPVQEKFVCLNCGFETHADEQAALNIARSWLFLRSQEYKKYQTNKTTGNTDKRAFVETWQSFYRKKLKEVWKPAV

SEQ ID NO: 104 - protein, 977 aa, synthetic construct
  REGION 1..977: note = CasX Variant
MQEIKRINKIRRRLVKDSNTKKAGKTGPMKTLLVRVMTPDLRERLENLRKKPENIPQPISNTSRANLNKLLTDYTEMKKAILHVYWEEFQKDPVGLMSRVAQPAPKNIDQRKLIPVKDGNERLTSSGFACSQCCQPLYVYKLEQVNDKGKPHTNYFGRCNVSEHERLILLSPHKPEANDELVTYSLGKFGQRALDFYSIHVTRESNHPVKPLEQIGGNSCASGPVGKALSDACMGAVASFLTKYQDIILEHKKVIKKNEKRLANLKDIASANGLAFPKITLPPQPHTKEGIEAYNNVVAQIVIWVNLNLWQKLKIGRDEAKPLQRLKGFPSFPLVERQANEVDWWDMVCNVKKLINEKKEDGKVFWQNLAGYKRQEALRPYLSSPEDRKKGKKFARYQFGDLLLHLEKKHGEDWGKVYDEAWERIDKKVEGLSKHIKLEEERRSEDAQSKAALTDWLRAKASFVIEGLKEADKDEFCRCELKLQKWYGDLRGKPFAIEAENSILDISGFSKQYNCAFIWQKDGVKKLNLYLIINYFKGGKLRFKKIKPEAFEANRFYTVINKKSGEIVPMEVNFNFDDPNLIILPLAFGKRQGREFIWNDLLSLETGSLKLANGRVIEKPLYNRRTRQDEPALFVALTFERREVLDSSNIKPMNLIGIDRGENIPAVIALTDPEGCPLSRFKDSLGNPTHILRIGESYKEKQRTIQAKKEVEQRRAGGYSRKYASKAKNLADDMVRNTARDLLYYAVTQDAMLIFENLSRGFGRQGKRTFMAERQYTRMEDWLTAKLAYEGLSKTYLSKTLAQYTSKTCSNCGFTITSADYDRVLEKLKKTATGWMTTINGKELKVEGQITYYNRYKRQNVVKDLSVELDRLSEESVNNDISSWTKGRSGEALSLLKKRFSHRPVQEKFVCLNCGFETHADEQAALNIARSWLFLRSQEYKKYQTNKTTGNTDKRAFVETWQSFYRKKLKEVWKPAV

SEQ ID NO: 105 - protein, 976 aa, synthetic construct
  REGION 1..976: note = CasX Variant
QEIKRINKIRRRLVKDSNTKKAGKTGPMKTLLVRVMTPDLRERLENLRKKPENIPQPISNTSRANLNKLLTDYTEMKKAILHVYWEEFQKDPVGLMSRVAQPAPKNIDQRKLIPVKDGNERLTSSGFACSQCCQPLYVYKLEQVNDKGKPHTNYFGRCNVSEHERLILLSPHKPEANDELVTYSLGKFGQRALDFYSIHVTRESNHPVKPLEQIGGNSCASGPVGKALSDACMGAVASFLTKYQDIILEHQKVIKKNEKRLANLKDIASANGLAFPKITLPPQPHTKEGIEAYNNVVAQIVIWVNLNLWQKLKIGRDEAKPLQRLKGFPSFPLVERQANEVDWWDMVCNVKKLINEKKEDGKVFWQNLAGYKRQEALRPYLSSEEDRKKGKKFARYQFGDLLLHLEKKHGEDWGKVYDEAWERIDKKVEGLSKHIKLEEERRSEDAQSKAALTDWLRAKASFVIEGLKEADKDEFCRCELKLQKWYGDLRGKPFAIEAENSILDISGFSKQYNCAFIWQKDGVKKLNLYLIINYFKGGKLRFKKIKPEAFEANRFYTVINKKSGEIVPMEVNFNFDDPNLIILPLAFGKRQGREFIWNDLLSLETGSLKLANGRVIEKTLYNRRTRQDEPALFVALTFERREVLDSSNIKPMNLIGIDRGENIPAVIALTDPEGCPLSRFKDSLGNPTHILRIGESYKEKQRTIQAKKEVEQRRAGGYSRKYASKAKNLADDMVRNTARDLLYYAVTQDAMLIFENLSRGFGRQGKRTFMAERQYTRMEDWLTAKLAYEGLSKTYLSKTLAQYTSKTCSNCGFTITSADYDRVLEKLKKTATGWMTTINGKELKVEGQITYYNRYKRQNVVKDLSVELDRLSEESVNNDISSWTKGRSGEALSLLKKRFSHRPVQEKFVCLNCGFETHADEQAALNIARSWLFLRSQEYKKYQTNKTTGNTDKRAFVETWQSFYRKKLKEVWKPAV

SEQ ID NO: 106 - protein, 977 aa, synthetic construct; identical to SEQ ID NO: 59
  REGION 1..977: note = CasX Variant

SEQ ID NO: 107 - protein, 977 aa, synthetic construct; identical to SEQ ID NO: 59
  REGION 1..977: note = CasX Variant

SEQ ID NO: 108 - protein, 977 aa, synthetic construct; identical to SEQ ID NO: 59
  REGION 1..977: note = CasX Variant

SEQ ID NO: 109 - protein, 977 aa, synthetic construct; identical to SEQ ID NO: 59
  REGION 1..977: note = CasX Variant

SEQ ID NO: 110 - protein, 977 aa, synthetic construct; identical to SEQ ID NO: 59
  REGION 1..977: note = CasX Variant

SEQ ID NO: 111 - protein, 978 aa, synthetic construct
  REGION 1..978: note = CasX Variant
MQEIKRINKIRRRLVKDSNTKKAGKTGPMKTLLVRVMTPDLRERLENLRKKPENIPQPISNTSRANLNKLLTDYTEMKKAILHVYWEEFQKDPVGLMSRVAQPAPKNIDQRKLIPVKDGNERLTMSSGFACSQCCQPLYVYKLEQVNDKGKPHTNYFGRCNVSEHERLILLSPHKPEANDELVTYSLGKFGQRALDFYSIHVTRESNHPVKPLEQIGGNSCASGPVGKALSDACMGAVASFLTKYQDIILEHQKVIKKNEKRLANLKDIASANGLAFPKITLPPQPHTKEGIEAYNNVVAQIVIWVNLNLWQKLKIGRDEAKPLQRLKGFPSFPLVERQANEVDWWDMVCNVKKLINEKKEDGKVFWQNLAGYKRQEALRPYLSSEEDRKKGKKFARYQFGDLLLHLEKKHGEDWGKVYDEAWERIDKKVEGLSKHIKLEEERRSEDAQSKAALTDWLRAKASFVIEGLKEADKDEFCRCELKLQKWYGDLRGKPFAIEAENSILDISGFSKQYNCAFIWQKDGVKKLNLYLIINYFKGGKLRFKKIKPEAFEANRFYTVINKKSGEIVPMEVNFNFDDPNLIILPLAFGKRQGREFIWNDLLSLETGSLKLANGRVIEKTLYNRRTRQDEPALFVALTFERREVLDSSNIKPMNLIGIDRGENIPAVIALTDPEGCPLSRFKDSLGNPTHILRIGESYKEKQRTIQAKKEVEQRRAGGYSRKYASKAKNLADDMVRNTARDLLYYAVTQDAMLIFENLSRGFGRQGKRTFMAERQYTRMEDWLTAKLAYEGLSKTYLSKTLAQYTSKTCSNCGFTITSADYDRVLEKLKKTATGWMTTINGKELKVEGQITYYNRYKRQNVVKDLSVELDRLSEESVNNDISSWTKGRSGEALSLLKKRFSHRPVQEKFVCLNCGFETHADEQAALNIARSWLFLRSQEYKKYQTNKTTGNTDKRAFVETWQSFYRKKLKEVWKPAV

SEQ ID NO: 112 - protein, 977 aa, synthetic construct; identical to SEQ ID NO: 59
  REGION 1..977: note = CasX Variant

SEQ ID NO: 113 - protein, 977 aa, synthetic construct; identical to SEQ ID NO: 59
  REGION 1..977: note = CasX Variant

SEQ ID NO: 114 - protein, 977 aa, synthetic construct; identical to SEQ ID NO: 59
  REGION 1..977: note = CasX Variant

SEQ ID NO: 115 - protein, 977 aa, synthetic construct; identical to SEQ ID NO: 59
  REGION 1..977: note = CasX Variant

SEQ ID NO: 116 - protein, 977 aa, synthetic construct; identical to SEQ ID NO: 59
  REGION 1..977: note = CasX Variant

SEQ ID NO: 117 - protein, 977 aa, synthetic construct; identical to SEQ ID NO: 59
  REGION 1..977: note = CasX Variant

SEQ ID NO: 118 - protein, 977 aa, synthetic construct
  REGION 1..977: note = CasX Variant
QEIKRINKIRRRLVKDSNTKKAGKTGPMKTLLVRVMTPDLRERLENLRKKPENIPQPISNTSRANLNKLLTDYTEMKKAILHVYWEEFQKDPVGLMSRVAQPASKKIDQNKLKPEMDEKGNLTTAGFACSQCGQPLFVYKLEQVSEKGKAYTNYFGRCNVAEHEKLILLAQLKPEKDSDEAVTYSLGKFGQRALDFYSIHVTRESNHPVKPLEQIGGNSCASGPVGKALSDACMGAVASFLTKYQDIILEHQKVIKKNEKRLANLKDIASANGLAFPKITLPPQPHTKEGIEAYNNVVAQIVIWVNLNLWQKLKIGRDEAKPLQRLKGFPSFPLVERQANEVDWWDMVCNVKKLINEKKEDGKVFWQNLAGYKRQEALRPYLSSEEDRKKGKKFARYQFGDLLLHLEKKHGEDWGKVYDEAWERIDKKVEGLSKHIKLEEERRSEDAQSKAALTDWLRAKASFVIEGLKEADKDEFCRCELKLQKWYGDLRGKPFAIEAENSILDISGFSKQYNCAFIWQKDGVKKLNLYLIINYFKGGKLRFKKIKPEAFEANRFYTVINKKSGEIVPMEVNFNFDDPNLIILPLAFGKRQGREFIWNDLLSLETGSLKLANGRVIEKTLYNRRTRQDEPALFVALTFERREVLDSSNIKPMNLIGIDRGENIPAVIALTDPEGCPLSRFKDSLGNPTHILRIGESYKEKQRTIQAKKEVEQRRAGGYSRKYASKAKNLADDMVRNTARDLLYYAVTQDAMLIFENLSRGFGRQGKRTFMAERQYTRMEDWLTAKLAYEGLSKTYLSKTLAQYTSKTCSNCGFTITSADYDRVLEKLKKTATGWMTTINGKELKVEGQITYYNRYKRQNVVKDLSVELDRLSEESVNNDISSWTKGRSGEALSLLKKRFSHRPVQEKFVCLNCGFETHADEQAALNIARSWLFLRSQEYKKYQTNKTTGNTDKRAFVETWQSFYRKKLKEVWKPAV

SEQ ID NO: 119 - protein, 976 aa, synthetic construct
  REGION 1..976: note = CasX Variant
QEIKRINKIRRRLVKDSNTKKAGKTGPMKTLLVRVMTPDLRERLENLRKKPENIPQPISNTSRANLNKLLTDYTEMKKAILHVYWEEFQKDPVGLMSRVAQPAPKNIDQRKLIPVKDGNERLTSSGFACSQCCQPLYVYKLEQVNDKGKPHTNYFGRCNVSEHERLILLSPHKPEANDELVTYSLGKFGQRALDFYSIHVTKESTHPVKPLAQIAGNRYASGPVGKALSDACMGTIASFLSKYQDIIIEHQKVVKGNQKRLESLRELAGKENLEYPSVTLPPQPHTKEGVDAYNEVIARVRMWVNLNLWQKLKLSRDDAKPLLRLKGFPSFPLVERQANEVDWWDMVCNVKKLINEKKEDGKVFWQNLAGYKRQEALRPYLSSEEDRKKGKKFARYQFGDLLLHLEKKHGEDWGKVYDEAWERIDKKVEGLSKHIKLEEERRSEDAQSKAALTDWLRAKASFVIEGLKEADKDEFCRCELKLQKWYGDLRGKPFAIEAENSILDISGFSKQYNCAFIWQKDGVKKLNLYLIINYFKGGKLRFKKIKPEAFEANRFYTVINKKSGEIVPMEVNFNFDDPNLIILPLAFGKRQGREFIWNDLLSLETGSLKLANGRVIEKTLYNRRTRQDEPALFVALTFERREVLDSSNIKPMNLIGIDRGENIPAVIALTDPEGCPLSRFKDSLGNPTHILRIGESYKEKQRTIQAKKEVEQRRAGGYSRKYASKAKNLADDMVRNTARDLLYYAVTQDAMLIFENLSRGFGRQGKRTFMAERQYTRMEDWLTAKLAYEGLSKTYLSKTLAQYTSKTCSNCGFTITSADYDRVLEKLKKTATGWMTTINGKELKVEGQITYYNRYKRQNVVKDLSVELDRLSEESVNNDISSWTKGRSGEALSLLKKRFSHRPVQEKFVCLNCGFETHADEQAALNIARSWLFLRSQEYKKYQTNKTTGNTDKRAFVETWQSFYRKKLKEVWKPAV

SEQ ID NO: 120 - protein, 976 aa, synthetic construct
  REGION 1..976: note = CasX Variant
QEIKRINKIRRRLVKDSNTKKAGKTGPMKTLLVRVMTPDLRERLENLRKKPENIPQPISNTSRANLNKLLTDYTEMKKAILHVYWEEFQKDPVGLMSRVAQPAPKNIDQRKLIPVKDGNERLTSSGFACSQCCQPLYVYKLEQVNDKGKPHTNYFGRCNVSEHERLILLSPHKPEANDELVTYSLGKFGQRALDFYSIHVTKESTHPVKPLAQIAGNRYASGPVGKALSDACMGTIASFLSKYQDIIIEHQKVVKGNQKRLESLRELAGKENLEYPSVTLPPQPHTKEGVDAYNEVIARVRMWVNLNLWQKLKLSRDDAKPLLRLKGFPSFPLVERQANEVDWWDMVCNVKKLINEKKEDGKVFWQNLAGYKRQEALRPYLSSEEDRKKGKKFARYQLGDLLLHLEKKHGEDWGKVYDEAWERIDKKVEGLSKHIKLEEERRSEDAQSKAALTDWLRAKASFVIEGLKEADKDEFCRCELKLQKWYGDLRGKPFAIEAENSILDISGFSKQYNCAFIWQKDGVKKLNLYLIINYFKGGKLRFKKIKPEAFEANRFYTVINKKSGEIVPMEVNFNFDDPNLIILPLAFGKRQGREFIWNDLLSLETGSLKLANGRVIEKTLYNRRTRQDEPALFVALTFERREVLDSSNIKPMNLIGVDRGENIPAVIALTDPEGCPLSRFKDSLGNPTHILRIGESYKEKQRTIQAKKEVEQRRAGGYSRKYASKAKNLADDMVRNTARDLLYYAVTQDAMLIFENLSRGFGRQGKRTFMAERQYTRMEDWLTAKLAYEGLSKTYLSKTLAQYTSKTCSNCGFTITSADYDRVLEKLKKTATGWMTTINGKELKVEGQITYYNRRKRQNVVKDLSVELDRLSEESVNNDISSWTKGRSGEALSLLKKRFSHRPVQEKFVCLNCGFETHADEQAALNIARSWLFLRSQEYKKYQTNKTTGNTDKRAFVETWQSFYRKKLKEVWKPAV

SEQ ID NO: 121 - protein, 976 aa, synthetic construct
  REGION 1..976: note = CasX Variant
QEIKRINKIRRRLVKDSNTKKAGKTGPMKTLLVRVMTPDLRERLENLRKKPENIPQPISNTSRANLNKLLTDYTEMKKAILHVYWEEFQKDPVGLMSRVAQPAPKNIDQRKLIPVKDGNERLTSSGFACSQCCQPLYVYKLEQVNDKGKPHTNYFGRCNVSEHERLILLSPHKPEANDELVTYSLGKFGQRALDFYSIHVTKESTHPVKPLAQIAGNRYASGPVGKALSDACMGTIASFLSKYQDIIIEHQKVVKGNQKRLESLRELAGKENLEYPSVTLPPQPHTKEGVDAYNEVIARVRMWVNLNLWQKLKLSRDDAKPLLRLKGFPSFPLVERQANEVDWWDMVCNVKKLINEKKEDGKVFWQNLAGYKRQEALRPYLSSEEDRKKGKKFARYQLGDLLKHLEKKHGEDWGKVYDEAWERIDKKVEGLSKHIKLEEERRSEDAQSKAALTDWLRAKASFVIEGLKEADKDEFCRCELKLQKWYGDLRGKPFAIEAENSILDISGFSKQYNCAFIWQKDGVKKLNLYLIINYFKGGKLRFKKIKPEAFEANRFYTVINKKSGEIVPMEVNFNFDDPNLIILPLAFGKRQGREFIWNDLLSLETGSLKLANGRVIEKTLYNRRTRQDEPALFVALTFERREVLDSSNIKPMNLIGVDRGENIPAVIALTDPEGCPLSRFKDSLGNPTHILRIGESYKEKQRTIQAKKEVEQRRAGGYSRKYASKAKNLADDMVRNTARDLLYYAVTQDAMLIFENLSRGFGRQGKRTFMAERQYTRMEDWLTAKLAYEGLSKTYLSKTLAQYTSKTCSNCGFTITSADYDRVLEKLKKTATGWMTTINGKELKVEGQITYYNRRKRQNVVKDLSVELDRLSEESVNNDISSWTKGRSGEALSLLKKRFSHRPVQEKFVCLNCGFETHADEQAALNIARSWLFLRSQEYKKYQTNKTTGNTDKRAFVETWQSFYRKKLKEVWKPAV

SEQ ID NO: 122 - protein, 976 aa, synthetic construct
  REGION 1..976: note = CasX Variant
QEIKRINKIRRRLVKDSNTKKAGKTGPMKTLLVRVMTPDLRERLENLRKKPENIPQPISNTSRANLNKLLTDYTEMKKAILHVYWEEFQKDPVGLMSRVAQPAPKNIDQRKLIPVKDGNERLTSSGFACSQCCQPLYVYKLEQVNDKGKPHTNYFGRCNVSEHERLILLSPHKPEANDELVTYSLGKFGQRALDFYSIHVTKESTHPVKPLAQIAGNRYASGPVGKALSDACMGTIASFLSKYQDIIIEHQKVVKGNQKRLESLRELAGKENLEYPSVTLPPQPHTKEGVDAYNEVIARVRMWVNLNLWQKLKLSRDDAKPLLRLKGFPSFPLVERQANEVDWWDMVCNVKKLINEKKEDGKVFWQNLAGYKRQEALRPYLSSEEDRKKGKKFARYQLGDLLLHLEKKHGEDWGKVYDEAWERIDKKVEGLSKHIKLEEERRSEDAQSKAALTDWLRAKASFVIEGLKEADKDEFCRCELKLQKWYGDLRGKPFAIEAENSILDISGFSKQYNCAFIWQKDGVKKLNLYLIINYFKGGKLRFKKIKPEAFEANRFYTVINKKSGEIVPMEVNFNFDDPNLIILPLAFGKRQGREFIWNDLLSLETGSLKLANGRVIEKTLYNRRTRQDEPALFVALTFERREVLDSSNIKPMNLIGVDRGENIPAVIALTDPEGCPLSRFKDSLGNPTHILRIGESYKEKQRTIQAKKEVEQRRAGGYSRKYASKAKNLADDMVRNTARDLLYYAVTQDAMLIFENLSRGFGRQGKRTFMAERQYTRMEDWLTAKLAYEGLSKTYLSKTLAQYTSKTCSNCGFTITSADYDRVLEKLKKTATGWMTTINGKELKVEGQITYYNRYKRQNVVKDLSVELDRLSEESVNNDISSWTKGRSGEALSLLKKRFSHRPVQEKFVCLNCGFETHADEQAALNIARSWLFLRSQEYKKYQTNKTTGNTDKRAFVETWQSFYRKKLKEVWKPAV

SEQ ID NO: 123 - protein, 977 aa, synthetic construct
  REGION 1..977: note = CasX Variant
QEIKRINKIRRRLVKDSNTKKAGKTGPMKTLLVRVMTPDLRERLENLRKKPENIPQPISNTSRANLNKLLTDYTEMKKAILHVYWEEFQKDPVGLMSRVAQPASKKIDQNKLKPEMDEKGNLTTAGFACSQCGQPLFVYKLEQVSEKGKAYTNYFGRCNVAEHEKLILLAQLKPEKDSDEAVTYSLGKFGQRALDFYSIHVTKESTHPVKPLAQIAGNRYASGPVGKALSDACMGTIASFLSKYQDIIIEHQKVVKGNQKRLESLRELAGKENLEYPSVTLPPQPHTKEGVDAYNEVIARVRMWVNLNLWQKLKLSRDDAKPLLRLKGFPSFPLVERQANEVDWWDMVCNVKKLINEKKEDGKVFWQNLAGYKRQEALRPYLSSEEDRKKGKKFARYQFGDLLLHLEKKHGEDWGKVYDEAWERIDKKVEGLSKHIKLEEERRSEDAQSKAALTDWLRAKASFVIEGLKEADKDEFCRCELKLQKWYGDLRGKPFAIEAENSILDISGFSKQYNCAFIWQKDGVKKLNLYLIINYFKGGKLRFKKIKPEAFEANRFYTVINKKSGEIVPMEVNFNFDDPNLIILPLAFGKRQGREFIWNDLLSLETGSLKLANGRVIEKTLYNRRTRQDEPALFVALTFERREVLDSSNIKPMNLIGIDRGENIPAVIALTDPEGCPLSRFKDSLGNPTHILRIGESYKEKQRTIQAKKEVEQRRAGGYSRKYASKAKNLADDMVRNTARDLLYYAVTQDAMLIFENLSRGFGRQGKRTFMAERQYTRMEDWLTAKLAYEGLSKTYLSKTLAQYTSKTCSNCGFTITSADYDRVLEKLKKTATGWMTTINGKELKVEGQITYYNRYKRQNVVKDLSVELDRLSEESVNNDISSWTKGRSGEALSLLKKRFSHRPVQEKFVCLNCGFETHADEQAALNIARSWLFLRSQEYKKYQTNKTTGNTDKRAFVETWQSFYRKKLKEVWKPAV

SEQ ID NO: 124 - protein, 977 aa, synthetic construct
  REGION 1..977: note = CasX Variant
QEIKRINKIRRRLVKDSNTKKAGKTGPMKTLLVRVMTPDLRERLENLRKKPENIPQPISNTSRANLNKLLTDYTEMKKAILHVYWEEFQKDPVGLMSRVAQPASKKIDQNKLKPEMDEKGNLTTAGFACSQCGQPLFVYKLEQVSEKGKAYTNYFGRCNVAEHEKLILLAQLKPEKDSDEAVTYSLGKFGQRALDFYSIHVTKESTHPVKPLAQIAGNRYASGPVGKALSDACMGTIASFLSKYQDIIIEHQKVVKGNQKRLESLRELAGKENLEYPSVTLPPQPHTKEGVDAYNEVIARVRMWVNLNLWQKLKLSRDDAKPLLRLKGFPSFPLVERQANEVDWWDMVCNVKKLINEKKEDGKVFWQNLAGYKRQEALRPYLSSEEDRKKGKKFARYQLGDLLLHLEKKHGEDWGKVYDEAWERIDKKVEGLSKHIKLEEERRSEDAQSKAALTDWLRAKASFVIEGLKEADKDEFCRCELKLQKWYGDLRGKPFAIEAENSILDISGFSKQYNCAFIWQKDGVKKLNLYLIINYFKGGKLRFKKIKPEAFEANRFYTVINKKSGEIVPMEVNFNFDDPNLIILPLAFGKRQGREFIWNDLLSLETGSLKLANGRVIEKTLYNRRTRQDEPALFVALTFERREVLDSSNIKPMNLIGVDRGENIPAVIALTDPEGCPLSRFKDSLGNPTHILRIGESYKEKQRTIQAKKEVEQRRAGGYSRKYASKAKNLADDMVRNTARDLLYYAVTQDAMLIFENLSRGFGRQGKRTFMAERQYTRMEDWLTAKLAYEGLSKTYLSKTLAQYTSKTCSNCGFTITSADYDRVLEKLKKTATGWMTTINGKELKVEGQITYYNRRKRQNVVKDLSVELDRLSEESVNNDISSWTKGRSGEALSLLKKRFSHRPVQEKFVCLNCGFETHADEQAALNIARSWLFLRSQEYKKYQTNKTTGNTDKRAFVETWQSFYRKKLKEVWKPAV

SEQ ID NO: 125 - protein, 977 aa, synthetic construct
  REGION 1..977: note = CasX Variant
QEIKRINKIRRRLVKDSNTKKAGKTGPMKTLLVRVMTPDLRERLENLRKKPENIPQPISNTSRANLNKLLTDYTEMKKAILHVYWEEFQKDPVGLMSRVAQPASKKIDQNKLKPEMDEKGNLTTAGFACSQCGQPLFVYKLEQVSEKGKAYTNYFGRCNVAEHEKLILLAQLKPEKDSDEAVTYSLGKFGQRALDFYSIHVTKESTHPVKPLAQIAGNRYASGPVGKALSDACMGTIASFLSKYQDIIIEHQKVVKGNQKRLESLRELAGKENLEYPSVTLPPQPHTKEGVDAYNEVIARVRMWVNLNLWQKLKLSRDDAKPLLRLKGFPSFPLVERQANEVDWWDMVCNVKKLINEKKEDGKVFWQNLAGYKRQEALRPYLSSEEDRKKGKKFARYQLGDLLKHLEKKHGEDWGKVYDEAWERIDKKVEGLSKHIKLEEERRSEDAQSKAALTDWLRAKASFVIEGLKEADKDEFCRCELKLQKWYGDLRGKPFAIEAENSILDISGFSKQYNCAFIWQKDGVKKLNLYLIINYFKGGKLRFKKIKPEAFEANRFYTVINKKSGEIVPMEVNFNFDDPNLIILPLAFGKRQGREFIWNDLLSLETGSLKLANGRVIEKTLYNRRTRQDEPALFVALTFERREVLDSSNIKPMNLIGVDRGENIPAVIALTDPEGCPLSRFKDSLGNPTHILRIGESYKEKQRTIQAKKEVEQRRAGGYSRKYASKAKNLADDMVRNTARDLLYYAVTQDAMLIFENLSRGFGRQGKRTFMAERQYTRMEDWLTAKLAYEGLSKTYLSKTLAQYTSKTCSNCGFTITSADYDRVLEKLKKTATGWMTTINGKELKVEGQITYYNRRKRQNVVKDLSVELDRLSEESVNNDISSWTKGRSGEALSLLKKRFSHRPVQEKFVCLNCGFETHADEQAALNIARSWLFLRSQEYKKYQTNKTTGNTDKRAFVETWQSFYRKKLKEVWKPAV

SEQ ID NO: 126 - protein, 977 aa, synthetic construct
  REGION 1..977: note = CasX Variant
QEIKRINKIRRRLVKDSNTKKAGKTGPMKTLLVRVMTPDLRERLENLRKKPENIPQPISNTSRANLNKLLTDYTEMKKAILHVYWEEFQKDPVGLMSRVAQPASKKIDQNKLKPEMDEKGNLTTAGFACSQCGQPLFVYKLEQVSEKGKAYTNYFGRCNVAEHEKLILLAQLKPEKDSDEAVTYSLGKFGQRALDFYSIHVTKESTHPVKPLAQIAGNRYASGPVGKALSDACMGTIASFLSKYQDIIIEHQKVVKGNQKRLESLRELAGKENLEYPSVTLPPQPHTKEGVDAYNEVIARVRMWVNLNLWQKLKLSRDDAKPLLRLKGFPSFPLVERQANEVDWWDMVCNVKKLINEKKEDGKVFWQNLAGYKRQEALRPYLSSEEDRKKGKKFARYQLGDLLLHLEKKHGEDWGKVYDEAWERIDKKVEGLSKHIKLEEERRSEDAQSKAALTDWLRAKASFVIEGLKEADKDEFCRCELKLQKWYGDLRGKPFAIEAENSILDISGFSKQYNCAFIWQKDGVKKLNLYLIINYFKGGKLRFKKIKPEAFEANRFYTVINKKSGEIVPMEVNFNFDDPNLIILPLAFGKRQGREFIWNDLLSLETGSLKLANGRVIEKTLYNRRTRQDEPALFVALTFERREVLDSSNIKPMNLIGVDRGENIPAVIALTDPEGCPLSRFKDSLGNPTHILRIGESYKEKQRTIQAKKEVEQRRAGGYSRKYASKAKNLADDMVRNTARDLLYYAVTQDAMLIFENLSRGFGRQGKRTFMAERQYTRMEDWLTAKLAYEGLSKTYLSKTLAQYTSKTCSNCGFTITSADYDRVLEKLKKTATGWMTTINGKELKVEGQITYYNRYKRQNVVKDLSVELDRLSEESVNNDISSWTKGRSGEALSLLKKRFSHRPVQEKFVCLNCGFETHADEQAALNIARSWLFLRSQEYKKYQTNKTTGNTDKRAFVETWQSFYRKKLKEVWKPAV

SEQ ID NO: 127 - protein, 977 aa, synthetic construct
  REGION 1..977: note = CasX Variant
QEIKRINKIRRRLVKDSNTKKAGKTGPMKTLLVRVMTPDLRERLENLRKKPENIPQPISNTSRANLNKLLTDYTEMKKAILHVYWEEFQKDPVGLMSRVAQPASKKIDQNKLKPEMDEKGNLTTAGFACSQCGQPLFVYKLEQVSEKGKAYTNYFGRCNVAEHEKLILLAQLKPEKDSDEAVTYSLGKFGQRALDFYSIHVTRESNHPVKPLEQIGGNSCASGPVGKALSDACMGAVASFLTKYQDIILEHQKVIKKNEKRLANLKDIASANGLAFPKITLPPQPHTKEGIEAYNNVVAQIVIWVNLNLWQKLKIGRDEAKPLQRLKGFPSFPLVERQANEVDWWDMVCNVKKLINEKKEDGKVFWQNLAGYKRQEALRPYLSSEEDRKKGKKFARYQLGDLLLHLEKKHGEDWGKVYDEAWERIDKKVEGLSKHIKLEEERRSEDAQSKAALTDWLRAKASFVIEGLKEADKDEFCRCELKLQKWYGDLRGKPFAIEAENSILDISGFSKQYNCAFIWQKDGVKKLNLYLIINYFKGGKLRFKKIKPEAFEANRFYTVINKKSGEIVPMEVNFNFDDPNLIILPLAFGKRQGREFIWNDLLSLETGSLKLANGRVIEKTLYNRRTRQDEPALFVALTFERREVLDSSNIKPMNLIGVDRGENIPAVIALTDPEGCPLSRFKDSLGNPTHILRIGESYKEKQRTIQAKKEVEQRRAGGYSRKYASKAKNLADDMVRNTARDLLYYAVTQDAMLIFENLSRGFGRQGKRTFMAERQYTRMEDWLTAKLAYEGLSKTYLSKTLAQYTSKTCSNCGFTITSADYDRVLEKLKKTATGWMTTINGKELKVEGQITYYNRYKRQNVVKDLSVELDRLSEESVNNDISSWTKGRSGEALSLLKKRFSHRPVQEKFVCLNCGFETHADEQAALNIARSWLFLRSQEYKKYQTNKTTGNTDKRAFVETWQSFYRKKLKEVWKPAV

SEQ ID NO: 128 - protein, 978 aa, synthetic construct
  REGION 1..978: note = CasX Variant
MQEIKRINKIRRRLVKDSNTKKAGKTGPMKTLLVRVMTPDLRERLENLRKKPENIPQPISNTSRANLNKLLTDYTEMKKAILHVYWEEFQKDPVGLMSRVAQPAPKNIDQRKLIPVKDGNERLTSSGFACSQCCQPLYVYKLEQVNDKGKPHTNYFGRCNVSEHERLILLSPHKPEANDELVTYSLGKFGQRALDFYSIHVTRESNHPVKPLEQIGGNSCASGPVGKALSDACMGAVASFLTKYQDIILEHQKVIKKNEKRLANLKDIASANGLAFPKITLPPQPHTKEGIEAYNNVVAQIVIWVNLNLWQKLKIGRDEAKPLQRLKGFPSFPLVERQANEVDWWDMVCNVKKLINEKKEDGKVFWQNLAGYKRQEALLPYLSSEEDRKKGKKFARYQFGDLLLHLEKKHGEDWGKVYDEAWERIDKKVEGLSKHIKLEEERRSEDAQSKAALTDWLRAKASFVIEGLKEADKDEFCRCELKLQKWYGDLRGKPFAIEAENSILDISGFSKQYNCAFIWQKDGVKKLNLYLIINYFKGGKLRFKKIKPEAFEANRFYTVINKKSGEIVPMEVNFNFDDPNLIILPLAFGKRQGREFIWNDLLSLETGSLKLANGRVIEKTLYNRRTRQDEPALFVALTFERREVLDSSNIKPMNLIGIDRGENIPAVIALTDPEGCPLSRFKDSLGNPTHILRIGESYKEKQRTIQAAKEVEQRRAGGYSRKYASKAKNLADDMVRNTARDLLYYAVTQDAMLIFENLSRGFGRQGKRTFMAERQYTRMEDWLTAKLAYEGLPSKTYLSKTLAQYTSKTCSNCGFTITSADYDRVLEKLKKTATGWMTTINGKELKVEGQITYYNRYKRQNVVKDLGVELDRLSEESVNNDISSWTKGRSGEALSLLKKRFSHRPVQEKFVCLNCGFETHADEQAALNIARSWLFLRSQEYKKYQTNKTTGNTDKRAFVETWQSFYRKKLKEVWKPAV

SEQ ID NO: 129 - protein, 986 aa, synthetic construct; identical to SEQ ID NO: 43
  REGION 1..986: note = CasX Variant

SEQ ID NO: 130 - protein, 978 aa, synthetic construct
  REGION 1..978: note = CasX Variant
MQEIKRINKIRRRLVKDSNTKKAGKTGPMKTLLVRVMTPDLRERLENLRKKPENIPQPISNTSRANLNKLLTDYTEMKKAILHVYWEEFQKDPVGLMSRVAQPAPKNIDQRKLIPVKDGNERLTSSGFACSQCCQPLYVYKLEQVNDKGKPHTNYFGRCNVSEHERLILLSPHKPEANDELVTYSLGKFGQRALDFYSIHVTRESNHPVKPLEQIGGNSCASGPVGKALSDACMGAVASFLTKYQDIILEHQKVIKKNEKRLANLKDIASANGLAFPKITLPPQPHTKEGIEAYNNVVAQIVIWVNLNLWQKLKIGRDEAKPLQRLKGFPSFPLVERQANEVDWWDMVCNVKKLINEKKEDGKVFWQNLAGYKRQEALRPYLSSEEDRKKGKKFARYQFGDLLLHLEKKHGEDWGKVYDEAWERIDKKVEGLSKHIKLEEERRSEDAQSKAALTDWLRAKASFVIEGLKEADKDEFCRCELKLQKWYGDLRGKPFAIEAENSILDISGFSKQYNCAFIWQKDGVKKLNLYLIINYFKGGKLRFKKIKPEAFEANRFYTVINKKSGEIVPMEVNFNFDDPNLIILPLAFGKRQGREFIWNDLLSLETGSLKLANGRVIEKTLYNRRTRQDEPALFVALTFERREVLDSSNIKPVNLIGVDRGENIPAVIALTDPEGCPLPEFKDSSGGPTDILRIGEGYKEKQRAIQAAKEVEQRRAGGYSRKFASKSRNLADDMVRNSARDLFYHAVTHDAVLVFENLSRGFGRQGKRTFMTERQYTKMEDWLTAKLAYEGLTSKTYLSKTLAQYTSKTCSNCGFTITSADYDRVLEKLKKTATGWMTTINGKELKVEGQITYYNRYKRQNVVKDLSVELDRLSEESVNNDISSWTKGRSGEALSLLKKRFSHRPVQEKFVCLNCGFETHADEQAALNIARSWLFLRSQEYKKYQTNKTTGNTDKRAFVETWQSFYRKKLKEVWKPAV

SEQ ID NO: 131 - protein, 972 aa, synthetic construct
  REGION 1..972: note = CasX Variant
MQEIKRINKIRRRLVKDSNTKKAGKTGPMKTLLVRVMTPDLRERLENLRKKPENIPQPISNTSRANLNKLLTDYTEMKKAILHVYWEEFQKDPVGLMSRVAQPAPKNIDQRKLIPVKDGNERLTSSGFACSQCCQPLYVYKLEQVNDKGKPHTNYFGRCNVSEHERLILLSPHKPEANDELVTYSLGKFGQRALDFYSIHVTRESNHPVKPLEQIGGNSCASGPVGKALSDACMGAVASFLTKYQDIILEHQKVIKKNEKRLANLKDIASANGLAFPKITLPPQPHTKEGIEAYNNVVAQIVIWVNLNLWQKLKIGRDEAKPLQRLKGFPSFPLVERQANEVDWWDMVCNVKKLINEKKEDGKVFWQNLAGYKRQEALRPYLSSEEDRKKGKKFARYQFGDLLLHLEKKHGEDWGKVYDEAWERIDKKVEGLSKHIKLEEERRSEDAQSKAALTDWLRAKASFVIEGLKEADKDEFCRCELKLQKWYGDLRGKPFAIEAENSILDISGFSKQYNCAFIWQKDGVKKLNLYLIINYFKGGKLRFKKIKPEAFEANRFYTVINKKSGEIVPMEVNFNFDDPNLIILPLAFGKRQGREFIWNDLLSLETGSLKLANGRVIEKTLYNRRTRQDEPALFVALTFERREVLDSSNIKPMNLIGIDRGENIPAVIALTDPEGCPLSRFKDSLGNPTHILRIGESYKEKQRTIQAKKEVEQRRAGGYSRKYASKAKNLADDMVRNTARDLLYYAVTQDAMLIFENLSRGFGRQGKRTFMAERQYTRMEDWLTAKLAYEGLSKTYLSKTLAQYTSKTCSNCGFTITSADYDRVLEKLKKTATGWMTTINGKELKVEGQITYYNRYKRQNVVKDLSVELDRLSEESVNNDISSWTKGRSGEALSLLKKRFSHRPVQEKFVCLNCGFETHADEQAALNIARSWLFLNSNSTEFKSYKSGKQPFVGAWQAFYKRRLKEVWKPNA

SEQ ID NO: 132 - protein, 84 aa, unidentified
  REGION 1..84: note = chloroplast transit peptide
MASMISSSAVTTVSRASRGQSAAMAPFGGLKSMTGFPVRKVNTDITSITSNGGRVKCMQVWPPIGKKKFETLSYLPPLTRDSRA

SEQ ID NO: 133 - protein, 57 aa, unidentified
  REGION 1..57: note = chloroplast transit peptide
MASMISSSAVTTVSRASRGQSAAMAPFGGLKSMTGFPVRKVNTDITSITSNGGRVKS

SEQ ID NO: 134 - protein, 85 aa, unidentified
  REGION 1..85: note = chloroplast transit peptide
MASSMLSSATMVASPAQATMVAPFNGLKSSAAFPATRKANNDITSITSNGGRVNCMQVWPPIEKKKFETLSYLPDLTDSGGRVNC

SEQ ID NO: 135 - protein, 76 aa, unidentified
  REGION 1..76: note = chloroplast transit peptide
MAQVSRICNGVQNPSLISNLSKSSQRKSPLSVSLKTQQHPRAYPISSSWGLKKSGMTLIGSELRPLKVMSSVSTAC

SEQ ID NO: 136 - protein, 76 aa, unidentified
  REGION 1..76: note = chloroplast transit peptide
MAQVSRICNGVWNPSLISNLSKSSQRKSPLSVSLKTQQHPRAYPISSSWGLKKSGMTLIGSELRPLKVMSSVSTAC

SEQ ID NO: 137 - protein, 72 aa, unidentified
  REGION 1..72: note = chloroplast transit peptide
MAQINNMAQGIQTLNPNSNFHKPQVPKSSSFLVFGSKKLKNSANSMLVLKKDSIFMQLFCSFRISASVATAC

SEQ ID NO: 138 - protein, 69 aa, unidentified
  REGION 1..69: note = chloroplast transit peptide
MAALVTSQLATSGTVLSVTDRFRRPGFQGLRPRNPADAALGMRTVGASAAPKQSRKPHRFDRRCLSMVV

SEQ ID NO: 139 - protein, 77 aa, unidentified
  REGION 1..77: note = chloroplast transit peptide
MAALTTSQLATSATGFGIADRSAPSSLLRHGFQGLKPRSPAGGDATSLSVTTSARATPKQQRSVQRGSRRFPSVVVC

SEQ ID NO: 140 - protein, 65 aa, unidentified
  REGION 1..65: note = chloroplast transit peptide
MESLAATSVFAPSRVAVPAARALVRAGTVVPTRRTSSTSGTSGVKCSAAVTPQASPVISRSAAAA

SEQ ID NO: 141 - protein, 72 aa, unidentified
  REGION 1..72: note = chloroplast transit peptide
MGAAATSMQSLKFSNRLVPPSRRLSPVPNNVTCNNLPKSAAPVRTVKCCASSWNSTINGAAATTNGASAASS

SEQ ID NO: 142 - protein, 20 aa, unidentified
  REGION 1..20: note = endosomal escape polypeptide
  VARIANT 4: note = K, H or R
  VARIANT 8: note = K, H or R
  VARIANT 11: note = K, H or R
  VARIANT 15: note = K, H or R
  VARIANT 19: note = K, H or R
GLFXALLXLLXSLWXLLLXA

SEQ ID NO: 143 - protein, 20 aa, unidentified
  REGION 1..20: note = endosomal escape polypeptide
GLFHALLHLLHSLWHLLLHA

SEQ ID NO: 144 - protein, 9 aa, unidentified
  REGION 1..9: note = endosomal escape polypeptide
HHHHHHHHH

SEQ ID NO: 145 - protein, 7 aa, Betapolyomavirus macaca mulatta polyomavirus 1
PKKKRKV

SEQ ID NO: 146 - protein, 16 aa, unidentified
  REGION 1..16: note = nuclear localization signal
KRPAATKKAGQAKKKK

SEQ ID NO: 147 - protein, 9 aa, Homo sapiens
PAAKRVKLD

SEQ ID NO: 148 - protein, 11 aa, Homo sapiens
RQRRNELKRSP

SEQ ID NO: 149 - protein, 38 aa, unidentified
  REGION 1..38: note = nuclear localization signal
NQSSNFGPMKGGNFGGRSSGPYGGGGQYFAKPRNQGGY

SEQ ID NO: 150 - protein, 42 aa, unidentified
  REGION 1..42: note = nuclear localization signal
RMRIZFKNKGKDTAELRRRRVEVSVELRKAKKDEQILKRRNV

SEQ ID NO: 151 - protein, 8 aa, unidentified
  REGION 1..8: note = nuclear localization signal
VSRKRPRP

SEQ ID NO: 152 - protein, 8 aa, unidentified
  REGION 1..8: note = nuclear localization signal
PPKKARED

SEQ ID NO: 153 - protein, 8 aa, Homo sapiens
PQPKKKPL

SEQ ID NO: 154 - protein, 12 aa, Mus musculus
SALIKKKKKMAP

SEQ ID NO: 155 - protein, 5 aa, Alphainfluenzavirus influenza A virus
DRLRR

SEQ ID NO: 156 - protein, 7 aa, Alphainfluenzavirus influenza A virus
PKQKKRK

SEQ ID NO: 157 - protein, 10 aa, Deltavirushepatitis delta virus
RKLKKKIKKL

SEQ ID NO: 158 - protein, 10 aa, Mus musculus
REKKKFLKRR

SEQ ID NO: 159 - protein, 20 aa, Homo sapiens
KRKGDEVDGVDEVAKKKSKK

SEQ ID NO: 160 - protein, 17 aa, Homo sapiens
RKCLQAGMNLEARKTKK

SEQ ID NO: 161 - protein, 8 aa, Orthobornavirus mammalian 1 orthobornavirus
PRPRKIPR

SEQ ID NO: 162 - protein, 9 aa, Hepacivirushepacivirus C
PPRKKRTVV

SEQ ID NO: 163 - protein, 12 aa, unidentified
  REGION 1..12: note = nuclear localization signal
NLSKKKKRKREK

SEQ ID NO: 164 - protein, 10 aa, unidentified
  REGION 1..10: note = nuclear localization signal
RRPSRPFRKP

SEQ ID NO: 165 - protein, 8 aa, Lymphocryptovirus human gammaherpesvirus 4
KRPRSPSS

SEQ ID NO: 166 - protein, 19 aa, Alphainfluenzavirus influenza A virus
KRGINDRNFWRGENERKTR

SEQ ID NO: 167 - protein, 11 aa, Homo sapiens
PRPPKMARYDN

SEQ ID NO: 168 - protein, 8 aa, unidentified
  REGION 1..8: note = nuclear localization signal
KRSFSKAF

SEQ ID NO: 169 - protein, 9 aa, unidentified
  REGION 1..9: note = nuclear localization signal
KLKIKRPVK

SEQ ID NO: 170 - protein, 19 aa, unidentified
  REGION 1..19: note = nuclear localization signal
PKKKRKVPPPPAAKRVKLD

SEQ ID NO: 171 - protein, 17 aa, Deltaretrovirus human T-lymphotropic virus 1
PKTRRRPRRSQRKRPPT

SEQ ID NO: 172 - protein, 24 aa, Caenorhabditis elegans
SRRRKANPTKLSENAKKLAKEVEN

SEQ ID NO: 173 - protein, 16 aa, unidentified
  REGION 1..16: note = nuclear localization signal
KTRRRPRRSQRKRPPT

SEQ ID NO: 174 - protein, 13 aa, unidentified
  REGION 1..13: note = nuclear localization signal
RRKKRRPRRKKRR

SEQ ID NO: 175 - protein, 14 aa, unidentified
  REGION 1..14: note = nuclear localization signal
PKKKSRKPKKKSRK

SEQ ID NO: 176 - protein, 17 aa, unidentified
  REGION 1..17: note = nuclear localization signal
HKKKHPDASVNFSEFSK

SEQ ID NO: 177 - protein, 18 aa, unidentified
  REGION 1..18: note = nuclear localization signal
QRPGPYDRPQRPGPYDRP

SEQ ID NO: 178 - protein, 16 aa, unidentified
  REGION 1..16: note = nuclear localization signal
LSPSLSPLLSPSLSPL

SEQ ID NO: 179 - protein, 18 aa, unidentified
  REGION 1..18: note = nuclear localization signal
RGKGGKGLGKGGAKRHRK

SEQ ID NO: 180 - protein, 14 aa, unidentified
  REGION 1..14: note = nuclear localization signal
PKRGRGRPKRGRGR

SEQ ID NO: 181 - protein, 19 aa, unidentified
  REGION 1..19: note = nuclear localization signal
PKKKRKVPPPPAAKRVKLD

SEQ ID NO: 182 - protein, 17 aa, unidentified
  REGION 1..17: note = nuclear localization signal
PKKKRKVPPPPKKKRKV

SEQ ID NO: 183 - protein, 11 aa, Human immunodeficiency virus 1
YGRKKRRQRRR

SEQ ID NO: 184 - protein, 8 aa, Human immunodeficiency virus 1
RKKRRQRR

SEQ ID NO: 185 - protein, 11 aa, Human immunodeficiency virus 1
YARAAARQARA

SEQ ID NO: 186 - protein, 11 aa, Human immunodeficiency virus 1
THRLPRRRRRR

SEQ ID NO: 187 - protein, 11 aa, Human immunodeficiency virus 1
GGRRARRRRRR

SEQ ID NO: 188 - protein, 50 aa, synthetic construct
  REGION 1..50: note = peptide transduction domain
  VARIANT 4..50: note = individual amino acid residues may be present or absent
RRRRRRRRRRRRRRRRRRRRRRRRRRRRRRRRRRRRRRRRRRRRRRRRRR

SEQ ID NO: 189 - protein, 12 aa, synthetic construct
  REGION 1..12: note = peptide transduction domain
RRQRRTSKLMKR

SEQ ID NO: 190 - protein, 27 aa, synthetic construct
  REGION 1..27: note = peptide transduction domain
GWTLNSAGYLLGKINLKALAALAKKIL

SEQ ID NO: 191 - protein, 33 aa, synthetic construct
  REGION 1..33: note = peptide transduction domain
KALAWEAKLAKALAKALAKHLAKALAKALKCEA

SEQ ID NO: 192 - protein, 16 aa, synthetic construct
  REGION 1..16: note = peptide transduction domain
RQIKIWFQNRRMKWKK

SEQ ID NO: 193 - protein, 5 aa, synthetic construct
  REGION 1..5: note = linker polypeptide
GSGGS

SEQ ID NO: 194 - protein, 6 aa, synthetic construct
  REGION 1..6: note = linker polypeptide
GGSGGS

SEQ ID NO: 195 - protein, 4 aa, synthetic construct
  REGION 1..4: note = linker polypeptide
GGGS

SEQ ID NO: 196 - protein, 4 aa, synthetic construct
  REGION 1..4: note = linker polypeptide
GGSG

SEQ ID NO: 197 - protein, 5 aa, synthetic construct
  REGION 1..5: note = linker polypeptide
GGSGG

SEQ ID NO: 198 - protein, 5 aa, synthetic construct
  REGION 1..5: note = linker polypeptide
GSGSG

SEQ ID NO: 199 - protein, 5 aa, synthetic construct
  REGION 1..5: note = linker polypeptide
GSGGG

SEQ ID NO: 200 - protein, 5 aa, synthetic construct
  REGION 1..5: note = linker polypeptide
GGGSG

SEQ ID NO: 201 - protein, 5 aa, synthetic construct
  REGION 1..5: note = linker polypeptide
GSSSG

SEQ ID NO: 202 - protein, 4 aa, synthetic construct
  REGION 1..4: note = linker polypeptide
GPGP

SEQ ID NO: 203 - protein, 6 aa, synthetic construct
  REGION 1..6: note = linker polypeptide
PPAPPA

SEQ ID NO: 204 - protein, 7 aa, synthetic construct
  REGION 1..7: note = linker polypeptide
PPPGPPP

SEQ ID NO: 205 - protein, 25 aa, unidentified
  REGION 1..25: note = nuclear localization signal
MSRRRKANPTKLSENAKKLAKEVEN

SEQ ID NO: 206 - DNA, 3120 bp, synthetic construct
  misc_feature 1..3120: note = CasX variant Stx2
  source 1..3120: mol_type = other DNA
atggctccgaagaagaagcgaaaggtcagccaggaaattaaacgcatcaacaagatccgccgtcgtctggtaaaagacagcaatacgaaaaaagccggaaaaaccggtccgatgaaaacgctgctggtgcgcgtgatgacgccggatctccgcgaacgtcttgagaatttgcgtaagaaacctgaaaatattccgcaaccgatttctaacacctcgcgcgccaatctgaataaactgctgaccgattacaccgaaatgaagaaagcgattctgcacgtttactgggaagagttccagaaagacccggtcggtctgatgagccgcgttgcgcaacctgcgccgaaaaatatcgatcagcgcaagttaatcccggttaaagatggtaatgaacgtttaacctccagcggctttgcctgcagtcagtgctgccagccactttatgtttataaacttgaacaggttaacgataaagggaaaccccataccaattatttcggccgctgcaatgtcagcgaacatgaacgcctgattttgttaagcccgcataaaccggaagcgaatgacgaactggtgacctattccctgggtaaatttggtcagcgggcgctggatttttacagcattcatgtgacgcgggaaagtaaccatccggtaaagccactggaacaaatcggcggtaacagctgcgcctctggcccggttggcaaagcgcttagcgatgcctgtatgggcgcggtggcgagctttctgacaaaataccaggatattatcctggagcatcagaaggtgatcaaaaagaacgagaaacgtctggcaaatttaaaggatattgcctccgctaacggcctggcgttcccgaagattaccttaccgccgcagccgcacaccaaagaaggtatcgaagcgtataacaacgttgttgcccagatcgtcatctgggtgaatctcaacctgtggcaaaaactgaaaattggtcgtgatgaagcaaaaccgttgcagcgactgaaaggattcccgtcgtttccgctggttgaacgacaggcgaacgaagtggattggtgggatatggtttgtaacgtcaaaaaattgatcaacgaaaaaaaggaagatggcaaagttttctggcaaaatctggcgggttacaaacgtcaggaggcgttgcttccgtatctctcttcagaagaagatcgcaaaaaaggcaagaagtttgctcgctatcagtttggcgatttattactgcatctggaaaaaaaacacggcgaagactggggcaaagtgtacgatgaagcctgggagcgtatcgacaaaaaagtggaaggtttgtcgaaacatattaaactcgaagaagagcgccgcagtgaagatgcgcagtcaaaagcagcgctgacggactggttacgtgcgaaagccagttttgtgattgaaggattaaaagaagctgataaagatgaattttgccgttgcgaactgaaactgcaaaaatggtatggcgacctgcgcggcaaaccgttcgccattgaggcagaaaatagcatccttgatatctccggtttcagcaaacaatataactgcgcgtttatttggcagaaagacggcgtgaaaaagcttaacctgtatctgatcattaactattttaaaggcgggaaactgcgtttcaagaaaatcaagccggaagcatttgaagccaatcgtttttataccgttattaataaaaaaagcggtgaaatcgtgccgatggaagttaattttaactttgatgatccgaacttgattattctgccgctggcattcggtaaacggcagggccgtgagtttatctggaacgacctgttatcgctggaaacgggcagcctgaaattagccaacggtcgcgtcattgaaaaaacgctctacaaccgccgcacccgccaggatgagccggcactgtttgtcgcgctgacctttgaacggcgtgaagtcctcgatagcagcaacatcaaaccaatgaaccttatcggtattgatcgtggtgaaaacattcctgccgttatcgccctgactgatccagaaggctgcccgctttctcgcttcaaagattcactgggcaacccgacccatatcctccgtattggcgagagctacaaagagaaacagcgtaccattcaggcagccaaagaagtggagcagcgtcgcgcgggcggctatagccgtaaatatgccagcaaagctaaaaacctggcggatgacatggtgcgtaacacggcgcgcgatttgctgtactacgccgtcacccaggacgcgatgctgatttttgagaacctctcccgcggttttgggcgtcagggtaaacgcacgtttatggcggaacgccagtatacgcgtatggaggactggctgaccgcgaagctggcctatgaaggcttgccgtctaaaacttacctgagcaagaccctggctcagtacaccagtaaaacctgtagtaattgcggctttaccatcaccagcgccgattatgaccgcgtgctggaaaagctgaagaaaaccgccaccggctggatgaccaccatcaatggtaaagagcttaaagtcgaagggcagattacttattacaaccgttataagcggcaaaacgtggtgaaagatctgtcggttgagctggaccgtttgtctgaagaaagcgtgaacaatgatatcagctcctggaccaaaggtcgttccggcgaagcgttaagtctgttgaaaaagcgctttagccatcgcccggtgcaggaaaaattcgtttgcctgaactgtggcttcgaaacccacgccgacgagcaagcggcgctcaatattgcgcgtagctggctgttcctgcgcagccaggaatataaaaaatatcaaaccaacaaaacaactggcaataccgacaagcgtgcctttgttgaaacctggcagagcttctatcgcaaaaaactgaaagaggtctggaaaccggcggtagcgccaaagaaaaaacgcaaagtgagcgaaaatctttattttcaaggtagcgcatggagtcatcctcaattcgagaaaggtggaggttctggcggtggatcgggaggttcagcgtggagccacccgcagttcgaaaaaggaaggggatccggctgctaa

SEQ ID NO: 207 - DNA, 3123 bp, synthetic construct
  misc_feature 1..3123: note = CasX variant 119
  source 1..3123: mol_type = other DNA
atggctccgaagaagaagcgaaaggtcagccaggaaattaaacgcatcaacaagatccgccgtcgtctggtaaaagacagcaatacgaaaaaagccggaaaaaccggtccgatgaaaacgctgctggtgcgcgtgatgacgccggatctccgcgaacgtcttgagaatttgcgtaagaaacctgaaaatattccgcaaccgatttctaacacctcgcgcgccaatctgaataaactgctgaccgattacaccgaaatgaagaaagcgattctgcacgtttactgggaagagttccagaaagacccggtcggtctgatgagccgcgttgcgcaacctgcgccgaaaaatatcgatcagcgcaagttaatcccggttaaagatggtaatgaacgtttaacctccagcggctttgcctgcagtcagtgctgccagccactttatgtttataaacttgaacaggttaacgataaagggaaaccccataccaattatttcggccgctgcaatgtcagcgaacatgaacgcctgattttgttaagcccgcataaaccggaagcgaatgacgaactggtgacctattccctgggtaaatttggtcagcgggcgctggatttttacagcattcatgtgacgcgggaaagtaaccatccggtaaagccactggaacaaatcggcggtaacagctgcgcctctggcccggttggcaaagcgcttagcgatgcctgtatgggcgcggtggcgagctttctgacaaaataccaggatattatcctggagcatcagaaggtgatcaaaaagaacgagaaacgtctggcaaatttaaaggatattgcctccgctaacggcctggcgttcccgaagattaccttaccgccgcagccgcacaccaaagaaggtatcgaagcgtataacaacgttgttgcccagatcgtcatctgggtgaatctcaacctgtggcaaaaactgaaaattggtcgtgatgaagcaaaaccgttgcagcgactgaaaggattcccgtcgtttccgctggttgaacgacaggcgaacgaagtggattggtgggatatggtttgtaacgtcaaaaaattgatcaacgaaaaaaaggaagatggcaaagttttctggcaaaatctggcgggttacaaacgtcaggaggcgttgcgtccgtatctctcttcagaagaagatcgcaaaaaaggcaagaagtttgctcgctatcagtttggcgatttattactgcatctggaaaaaaaacacggcgaagactggggcaaagtgtacgatgaagcctgggagcgtatcgacaaaaaagtggaaggtttgtcgaaacatattaaactcgaagaagagcgccgcagtgaagatgcgcagtcaaaagcagcgctgacggactggttacgtgcgaaagccagttttgtgattgaaggattaaaagaagctgataaagatgaattttgccgttgcgaactgaaactgcaaaaatggtatggcgacctgcgcggcaaaccgttcgccattgaggcagaaaatagcatccttgatatctccggtttcagcaaacaatataactgcgcgtttatttggcagaaagacggcgtgaaaaagcttaacctgtatctgatcattaactattttaaaggcgggaaactgcgtttcaagaaaatcaagccggaagcatttgaagccaatcgtttttataccgttattaataaaaaaagcggtgaaatcgtgccgatggaagttaattttaactttgatgatccgaacttgattattctgccgctggcattcggtaaacggcagggccgtgagtttatctggaacgacctgttatcgctggaaacgggcagcctgaaattagccaacggtcgcgtcattgaaaaaacgctctacaaccgccgcacccgccaggatgagccggcactgtttgtcgcgctgacctttgaacggcgtgaagtcctcgatagcagcaacatcaaaccaatgaaccttatcggtattgatcgtggtgaaaacattcctgccgttatcgccctgactgatccagaaggctgcccgctttctcgcttcaaagattcactgggcaacccgacccatatcctccgtattggcgagagctacaaagagaaacagcgtaccattcaggcaaagaaagaagtggagcagcgtcgcgcgggcggctatagccgtaaatatgccagcaaagctaaaaacctggcggatgacatggtgcgtaacacggcgcgcgatttgctgtactacgccgtcacccaggacgcgatgctgatttttgagaacctctcccgcggttttgggcgtcagggtaaacgcacgtttatggcggaacgccagtatacgcgtatggaggactggctgaccgcgaagctggcctatgaaggcttgtctaaaacttacctgagcaagaccctggctcagtacaccagtaaaacctgtagtaattgcggctttaccatcaccagcgccgattatgaccgcgtgctggaaaagctgaagaaaaccgccaccggctggatgaccaccatcaatggtaaagagcttaaagtcgaagggcagattacttattacaaccgttataagcggcaaaacgtggtgaaagatctgtcggttgagctggaccgtttgtctgaagaaagcgtgaacaatgatatcagctcctggaccaaaggtcgttccggcgaagcgttaagtctgttgaaaaagcgctttagccatcgcccggtgcaggaaaaattcgtttgcctgaactgtggcttcgaaacccacgccgacgagcaagcggcgctcaatattgcgcgtagctggctgttcctgcgcagccaggaatataaaaaatatcaaaccaacaaaacaactggcaataccgacaagcgtgcctttgttgaaacctggcagagcttctatcgcaagaagctgaaagaggtctggaaaccggcggtaccacctgcgccaaagaaaaaacgcaaagtgagcgaaaatctttattttcaaggtagcgcatggagtcatcctcaattcgagaaaggtggaggttctggcggtggatcgggaggttcagcgtggagccacccgcagttcgaaaaaggaaggggatccggctgctaa

SEQ ID NO: 208 - protein, 976 aa, synthetic construct; identical to SEQ ID NO: 105
  REGION 1..976: note = CasX variant 119

SEQ ID NO: 209 - DNA, 2928 bp, synthetic construct
  misc_feature 1..2928: note = CasX variant 457
  source 1..2928: mol_type = other DNA
caagagatcaagagaatcaacaagatcagaaggagactggtcaaggacagcaacacaaagaaggccggcaagacaggccccatgaaaaccctgctcgtcagagtgatgacccctgacctgagagagcggctggaaaacctgagaaagaagcccgagaacatccctcagcctatcagcaacaccagcagggccaacctgaacaagctgctgaccgactacaccgagatgaagaaagccatcctgcacgtgtactgggaagagttccagaaagaccccgtgggcctgatgagcagagttgctcagcccgctcctaagaacatcgaccagagaaagctgatccccgtgaaggacggcaacgagagactgacctctagcggctttgcctgcagccagtgttgccagcctctgtacgtgtacaagctggaacaagtgaacgacaagggcaagccccacaccaactacttcggcagatgcaacgtgtccgagcacgagaggctgatcctgctgtctcctcacaagcccgaggccaacgatgagctggtcacatacagcctgggcaagttcggacagagagccctggacttctacagcatccacgtgaccagggagagcaatcaccctgtgaagcccctggaacagatcggcggcaatagctgtgcctctggacctgtgggaaaagccctgagcgacgcctgtatgggagccgtggcatccttcctgaccaagtaccaggacatcatcctggaacacaagaaagtgatcaagaagaacgagaaaagactggccaacctcaaggatatcgccagcgctaacggcctggcctttcctaagatcaccctgcctccacagcctcacaccaaagagggcatcgaggcctacaacaacgtggtggcccagatcgtgatttgggtcaacctgaatctgtggcagaagctgaagatcggcagggacgaagccaagccactgcagagactgaagggcttccctagcttccctctggtggaaagacaggccaatgaagtggattggtgggacatggtctgcaacgtgaagaagctgatcaacgagaagaaagaggatggcaaggttttctggcagaacctggccggctacaagagacaagaagccctgaggccttacctgagcagccccgaggaccggaagaagggcaagaagttcgccagataccagctgggcgacctgctgctgcacctggaaaagaagcacggcgaggactggggcaaagtgtacgatgaggcctgggagagaatcgacaagaaggtggaaggcctgagcaagcacattaagctggaagaggaaagaaggagcgaggacgcccaatctaaagccgctctgaccgattggctgagagccaaggccagctttgtgatcgagggcctgaaagaggccgacaaggacgagttctgcagatgcgagctgaagctgcagaagtggtacggcgatctgagaggcaagcccttcgccattgaggccgagaacagcatcctggacatcagcggcttcagcaagcagtacaactgcgccttcatttggcagaaagacggcgtcaagaaactgaacctgtacctgatcatcaattacttcaaaggcggcaagctgcggttcaagaagatcaaacccgaggccttcgaggctaacagattctacaccgtgatcaacaaaaagtccggcgagatcgtgcccatggaagtgaacttcaacttcgacgaccccaacctgattatcctgcctctggccttcggcaagagacagggcagagagttcatctggaacgatctgctgagcctggaaaccggctctctgaagctggccaatggcagagtgatcgagaaacccctgtacaacaggagaaccagacaggacgagcctgctctgtttgtggccctgaccttcgagagaagagaggtgctggacagcagcaacatcaagcccatgaacctgatcggcgtggaccggggcgagaatatccctgctgtgatcgccctgacagaccctgaaggatgcccactgagcagattcaaggactccctgggcaaccctacacacatcctgagaatcggcgagagctacaaagagaagcagaggacaatccaggccaagaaagaggtggaacagagaagagccggcggatactctaggaagtacgccagcaaggccaagaatctggccgacgacatggtccgaaacaccgccagagatctgctgtactacgccgtgacacaggacgccatgctgatcttcgagaatctgagcagaggcttcggccggcagggcaagagaacctttatggccgagaggcagtacaccagaatggaagattggctcacagctaaactggcctacgagggactgagcaagacctacctgtccaaaacactggcccagtatacctccaagacctgcagcaattgcggcttcaccatcaccagcgccgactacgacagagtgctggaaaagctcaagaaaaccgccaccggctggatgaccaccatcaacggcaaagagctgaaggttgagggccagatcacctactacaacaggaggaagaggcagaacgtcgtgaaggatctgagcgtggaactggacagactgagcgaagagagcgtgaacaacgacatcagcagctggacaaagggcagatcaggcgaggctctgagcctgctgaagaagaggtttagccacagacctgtgcaagagaagttcgtgtgcctgaactgcggcttcgagacacacgccgatgaacaggctgccctgaacattgccagaagctggctgttcctgagaagccaagagtacaagaagtaccagaccaacaagaccaccggcaacaccgacaagagggcctttgtggaaacctggcagagcttctacagaaaaaagctgaaagaagtctggaagcccgccgtg

SEQ ID NO: 210 - protein, 976 aa, synthetic construct
  REGION 1..976: note = CasX variant 457
QEIKRINKIRRRLVKDSNTKKAGKTGPMKTLLVRVMTPDLRERLENLRKKPENIPQPISNTSRANLNKLLTDYTEMKKAILHVYWEEFQKDPVGLMSRVAQPAPKNIDQRKLIPVKDGNERLTSSGFACSQCCQPLYVYKLEQVNDKGKPHTNYFGRCNVSEHERLILLSPHKPEANDELVTYSLGKFGQRALDFYSIHVTRESNHPVKPLEQIGGNSCASGPVGKALSDACMGAVASFLTKYQDIILEHKKVIKKNEKRLANLKDIASANGLAFPKITLPPQPHTKEGIEAYNNVVAQIVIWVNLNLWQKLKIGRDEAKPLQRLKGFPSFPLVERQANEVDWWDMVCNVKKLINEKKEDGKVFWQNLAGYKRQEALRPYLSSPEDRKKGKKFARYQLGDLLLHLEKKHGEDWGKVYDEAWERIDKKVEGLSKHIKLEEERRSEDAQSKAALTDWLRAKASFVIEGLKEADKDEFCRCELKLQKWYGDLRGKPFAIEAENSILDISGFSKQYNCAFIWQKDGVKKLNLYLIINYFKGGKLRFKKIKPEAFEANRFYTVINKKSGEIVPMEVNFNFDDPNLIILPLAFGKRQGREFIWNDLLSLETGSLKLANGRVIEKPLYNRRTRQDEPALFVALTFERREVLDSSNIKPMNLIGVDRGENIPAVIALTDPEGCPLSRFKDSLGNPTHILRIGESYKEKQRTIQAKKEVEQRRAGGYSRKYASKAKNLADDMVRNTARDLLYYAVTQDAMLIFENLSRGFGRQGKRTFMAERQYTRMEDWLTAKLAYEGLSKTYLSKTLAQYTSKTCSNCGFTITSADYDRVLEKLKKTATGWMTTINGKELKVEGQITYYNRRKRQNVVKDLSVELDRLSEESVNNDISSWTKGRSGEALSLLKKRFSHRPVQEKFVCLNCGFETHADEQAALNIARSWLFLRSQEYKKYQTNKTTGNTDKRAFVETWQSFYRKKLKEVWKPAV

SEQ ID NO: 211 - DNA, 2928 bp, synthetic construct
  misc_feature 1..2928: note = CasX variant 438
  source 1..2928: mol_type = other DNA
caagagatcaagagaatcaacaagatcagaaggagactggtcaaggacagcaacacaaagaaggccggcaagacaggccccatgaaaaccctgctcgtcagagtgatgacccctgacctgagagagcggctggaaaacctgagaaagaagcccgagaacatccctcagcctatcagcaacaccagcagggccaacctgaacaagctgctgaccgactacaccgagatgaagaaagccatcctgcacgtgtactgggaagagttccagaaagaccccgtgggcctgatgagcagagttgctcagcccgctcctaagaacatcgaccagagaaagctgatccccgtgaaggacggcaacgagagactgacctctagcggctttgcctgcagccagtgttgccagcctctgtacgtgtacaagctggaacaagtgaacgacaagggcaagccccacaccaactacttcggcagatgcaacgtgtccgagcacgagaggctgatcctgctgtctcctcacaagcccgaggccaacgatgagctggtcacatacagcctgggcaagttcggacagagagccctggacttctacagcatccacgtgaccagggagagcaatcaccctgtgaagcccctggaacagatcggcggcaatagctgtgcctctggacctgtgggaaaagccctgagcgacgcctgtatgggagccgtggcatccttcctgaccaagtaccaggacatcatcctggaacaccagaaagtgatcaagaagaacgagaaaagactggccaacctcaaggatatcgccagcgctaacggcctggcctttcctaagatcaccctgcctccacagcctcacaccaaagagggcatcgaggcctacaacaacgtggtggcccagatcgtgatttgggtcaacctgaatctgtggcagaagctgaagatcggcagggacgaagccaagccactgcagagactgaagggcttccctagcttccctctggtggaaagacaggccaatgaagtggattggtgggacatggtctgcaacgtgaagaagctgatcaacgagaagaaagaggatggcaaggttttctggcagaacctggccggctacaagagacaagaagccctgaggccttacctgagcagcgaagaggaccggaagaagggcaagaagttcgccagataccagctgggcgacctgctgaagcacctggaaaagaagcacggcgaggactggggcaaagtgtacgatgaggcctgggagagaatcgacaagaaggtggaaggcctgagcaagcacattaagctggaagaggaaagaaggagcgaggacgcccaatctaaagccgctctgaccgattggctgagagccaaggccagctttgtgatcgagggcctgaaagaggccgacaaggacgagttctgcagatgcgagctgaagctgcagaagtggtacggcgatctgagaggcaagcccttcgccattgaggccgagaacagcatcctggacatcagcggcttcagcaagcagtacaactgcgccttcatttggcagaaagacggcgtcaagaaactgaacctgtacctgatcatcaattacttcaaaggcggcaagctgcggttcaagaagatcaaacccgaggccttcgaggctaacagattctacaccgtgatcaacaaaaagtccggcgagatcgtgcccatggaagtgaacttcaacttcgacgaccccaacctgattatcctgcctctggccttcggcaagagacagggcagagagttcatctggaacgatctgctgagcctggaaaccggctctctgaagctggccaatggcagagtgatcgagaaaaccctgtacaacaggagaaccagacaggacgagcctgctctgtttgtggccctgaccttcgagagaagagaggtgctggacagcagcaacatcaagcccatgaacctgatcggcgtggaccggggcgagaatatccctgctgtgatcgccctgacagaccctgaaggatgcccactgagcagattcaaggactccctgggcaaccctacacacatcctgagaatcggcgagagctacaaagagaagcagaggacaatccaggccaagaaagaggtggaacagagaagagccggcggatactctaggaagtacgccagcaaggccaagaatctggccgacgacatggtccgaaacaccgccagagatctgctgtactacgccgtgacacaggacgccatgctgatcttcgagaatctgagcagaggcttcggccggcagggcaagagaacctttatggccgagaggcagtacaccagaatggaagattggctcacagctaaactggcctacgagggactgagcaagacctacctgtccaaaacactggcccagtatacctccaagacctgcagcaattgcggcttcaccatcaccagcgccgactacgacagagtgctggaaaagctcaagaaaaccgccaccggctggatgaccaccatcaacggcaaagagctgaaggttgagggccagatcacctactacaacaggaggaagaggcagaacgtcgtgaaggatctgagcgtggaactggacagactgagcgaagagagcgtgaacaacgacatcagcagctggacaaagggcagatcaggcgaggctctgagcctgctgaagaagaggtttagccacagacctgtgcaagagaagttcgtgtgcctgaactgcggcttcgagacacacgccgatgaacaggctgccctgaacattgccagaagctggctgttcctgagaagccaagagtacaagaagtaccagaccaacaagaccaccggcaacaccgacaagagggcctttgtggaaacctggcagagcttctacagaaaaaagctgaaagaagtctggaagcccgccgtg

SEQ ID NO: 212 - protein, 976 aa, synthetic construct
  REGION 1..976: note = CasX variant 438
QEIKRINKIRRRLVKDSNTKKAGKTGPMKTLLVRVMTPDLRERLENLRKKPENIPQPISNTSRANLNKLLTDYTEMKKAILHVYWEEFQKDPVGLMSRVAQPAPKNIDQRKLIPVKDGNERLTSSGFACSQCCQPLYVYKLEQVNDKGKPHTNYFGRCNVSEHERLILLSPHKPEANDELVTYSLGKFGQRALDFYSIHVTRESNHPVKPLEQIGGNSCASGPVGKALSDACMGAVASFLTKYQDIILEHQKVIKKNEKRLANLKDIASANGLAFPKITLPPQPHTKEGIEAYNNVVAQIVIWVNLNLWQKLKIGRDEAKPLQRLKGFPSFPLVERQANEVDWWDMVCNVKKLINEKKEDGKVFWQNLAGYKRQEALRPYLSSEEDRKKGKKFARYQLGDLLKHLEKKHGEDWGKVYDEAWERIDKKVEGLSKHIKLEEERRSEDAQSKAALTDWLRAKASFVIEGLKEADKDEFCRCELKLQKWYGDLRGKPFAIEAENSILDISGFSKQYNCAFIWQKDGVKKLNLYLIINYFKGGKLRFKKIKPEAFEANRFYTVINKKSGEIVPMEVNFNFDDPNLIILPLAFGKRQGREFIWNDLLSLETGSLKLANGRVIEKTLYNRRTRQDEPALFVALTFERREVLDSSNIKPMNLIGVDRGENIPAVIALTDPEGCPLSRFKDSLGNPTHILRIGESYKEKQRTIQAKKEVEQRRAGGYSRKYASKAKNLADDMVRNTARDLLYYAVTQDAMLIFENLSRGFGRQGKRTFMAERQYTRMEDWLTAKLAYEGLSKTYLSKTLAQYTSKTCSNCGFTITSADYDRVLEKLKKTATGWMTTINGKELKVEGQITYYNRRKRQNVVKDLSVELDRLSEESVNNDISSWTKGRSGEALSLLKKRFSHRPVQEKFVCLNCGFETHADEQAALNIARSWLFLRSQEYKKYQTNKTTGNTDKRAFVETWQSFYRKKLKEVWKPAV

SEQ ID NO: 213 - DNA, 2931 bp, synthetic construct
  misc_feature 1..2931: note = CasX variant 488
  source 1..2931: mol_type = other DNA
caagagatcaagagaatcaacaagatcagaaggagactggtcaaggacagcaacacaaagaaggccggcaagacaggccccatgaaaaccctgctcgtcagagtgatgacccctgacctgagagagcggctggaaaacctgagaaagaagcccgagaacatccctcagcctatcagcaacaccagcagggccaacctgaacaagctgctgaccgactacaccgagatgaagaaagccatcctgcacgtgtactgggaagagttccagaaagaccccgtgggcctgatgagcagagttgctcagcctgccagcaagaagatcgaccagaacaagctgaagcccgagatggacgagaagggcaatctgaccacagccggctttgcctgctctcagtgtggccagcctctgttcgtgtacaagctggaacaggtgtccgagaaaggcaaggcctacaccaactacttcggcagatgtaacgtggccgagcacgagaagctgattctgctggcccagctgaaacctgagaaggactctgatgaggccgtgacctacagcctgggcaagtttggacagagagccctggacttctacagcatccacgtgaccaaagaaagcacacaccccgtgaagcccctggctcagatcgccggcaatagatacgcctctggacctgtgggcaaagccctgtccgatgcctgcatgggaacaatcgccagcttcctgagcaagtaccaggacatcatcatcgagcaccagaaggtggtcaagggcaaccagaagagactggaaagcctgagggagctggccggcaaagagaacctggaataccccagcgtgaccctgcctcctcagcctcacacaaaagaaggcgtggacgcctacaacgaagtgatcgccagagtgagaatgtgggtcaacctgaacctgtggcagaagctgaaactgtccagggacgacgccaagcctctgctgagactgaagggcttccctagcttccctctggtggaaagacaggccaatgaagtggattggtgggacatggtctgcaacgtgaagaagctgatcaacgagaagaaagaggatggcaaggttttctggcagaacctggccggctacaagagacaagaagccctgaggccttacctgagcagcgaagaggaccggaagaagggcaagaagttcgccagataccagttcggcgacctgctgctgcacctggaaaagaagcacggcgaggactggggcaaagtgtacgatgaggcctgggagagaatcgacaagaaggtggaaggcctgagcaagcacattaagctggaagaggaaagaaggagcgaggacgcccaatctaaagccgctctgaccgattggctgagagccaaggccagctttgtgatcgagggcctgaaagaggccgacaaggacgagttctgcagatgcgagctgaagctgcagaagtggtacggcgatctgagaggcaagcccttcgccattgaggccgagaacagcatcctggacatcagcggcttcagcaagcagtacaactgcgccttcatttggcagaaagacggcgtcaagaaactgaacctgtacctgatcatcaattacttcaaaggcggcaagctgcggttcaagaagatcaaacccgaggccttcgaggctaacagattctacaccgtgatcaacaaaaagtccggcgagatcgtgcccatggaagtgaacttcaacttcgacgaccccaacctgattatcctgcctctggccttcggcaagagacagggcagagagttcatctggaacgatctgctgagcctggaaaccggctctctgaagctggccaatggcagagtgatcgagaaaaccctgtacaacaggagaaccagacaggacgagcctgctctgtttgtggccctgaccttcgagagaagagaggtgctggacagcagcaacatcaagcccatgaacctgatcggcatcgaccggggcgagaatatccctgctgtgatcgccctgacagaccctgaaggatgcccactgagcagattcaaggactccctgggcaaccctacacacatcctgagaatcggcgagagctacaaagagaagcagaggacaatccaggccaagaaagaggtggaacagagaagagccggcggatactctaggaagtacgccagcaaggccaagaatctggccgacgacatggtccgaaacaccgccagagatctgctgtactacgccgtgacacaggacgccatgctgatcttcgagaatctgagcagaggcttcggccggcagggcaagagaacctttatggccgagaggcagtacaccagaatggaagattggctcacagctaaactggcctacgagggactgagcaagacctacctgtccaaaacactggcccagtatacctccaagacctgcagcaattgcggcttcaccatcaccagcgccgactacgacagagtgctggaaaagctcaagaaaaccgccaccggctggatgaccaccatcaacggcaaagagctgaaggttgagggccagatcacctactacaacaggtacaagaggcagaacgtcgtgaaggatctgagcgtggaactggacagactgagcgaagagagcgtgaacaacgacatcagcagctggacaaagggcagatcaggcgaggctctgagcctgctgaagaagaggtttagccacagacctgtgcaagagaagttcgtgtgcctgaactgcggcttcgagacacacgccgatgaacaggctgccctgaacattgccagaagctggctgttcctgagaagccaagagtacaagaagtaccagaccaacaagaccaccggcaacaccgacaagagggcctttgtggaaacctggcagagcttctacagaaaaaagctgaaagaagtctggaagcccgccgtg

SEQ ID NO: 214 - protein, 977 aa, synthetic construct; identical to SEQ ID NO: 123
  REGION 1..977: note = CasX variant 488

SEQ ID NO: 215 - DNA, 2931 bp, synthetic construct
  misc_feature 1..2931: note = CasX variant 491
  source 1..2931: mol_type = other DNA
caagagatcaagagaatcaacaagatcagaaggagactggtcaaggacagcaacacaaagaaggccggcaagacaggccccatgaaaaccctgctcgtcagagtgatgacccctgacctgagagagcggctggaaaacctgagaaagaagcccgagaacatccctcagcctatcagcaacaccagcagggccaacctgaacaagctgctgaccgactacaccgagatgaagaaagccatcctgcacgtgtactgggaagagttccagaaagaccccgtgggcctgatgagcagagttgctcagcctgccagcaagaagatcgaccagaacaagctgaagcccgagatggacgagaagggcaatctgaccacagccggctttgcctgctctcagtgtggccagcctctgttcgtgtacaagctggaacaggtgtccgagaaaggcaaggcctacaccaactacttcggcagatgtaacgtggccgagcacgagaagctgattctgctggcccagctgaaacctgagaaggactctgatgaggccgtgacctacagcctgggcaagtttggacagagagccctggacttctacagcatccacgtgaccaaagaaagcacacaccccgtgaagcccctggctcagatcgccggcaatagatacgcctctggacctgtgggcaaagccctgtccgatgcctgcatgggaacaatcgccagcttcctgagcaagtaccaggacatcatcatcgagcaccagaaggtggtcaagggcaaccagaagagactggaaagcctgagggagctggccggcaaagagaacctggaataccccagcgtgaccctgcctcctcagcctcacacaaaagaaggcgtggacgcctacaacgaagtgatcgccagagtgagaatgtgggtcaacctgaacctgtggcagaagctgaaactgtccagggacgacgccaagcctctgctgagactgaagggcttccctagcttccctctggtggaaagacaggccaatgaagtggattggtgggacatggtctgcaacgtgaagaagctgatcaacgagaagaaagaggatggcaaggttttctggcagaacctggccggctacaagagacaagaagccctgaggccttacctgagcagcgaagaggaccggaagaagggcaagaagttcgccagataccagctgggcgacctgctgctgcacctggaaaagaagcacggcgaggactggggcaaagtgtacgatgaggcctgggagagaatcgacaagaaggtggaaggcctgagcaagcacattaagctggaagaggaaagaaggagcgaggacgcccaatctaaagccgctctgaccgattggctgagagccaaggccagctttgtgatcgagggcctgaaagaggccgacaaggacgagttctgcagatgcgagctgaagctgcagaagtggtacggcgatctgagaggcaagcccttcgccattgaggccgagaacagcatcctggacatcagcggcttcagcaagcagtacaactgcgccttcatttggcagaaagacggcgtcaagaaactgaacctgtacctgatcatcaattacttcaaaggcggcaagctgcggttcaagaagatcaaacccgaggccttcgaggctaacagattctacaccgtgatcaacaaaaagtccggcgagatcgtgcccatggaagtgaacttcaacttcgacgaccccaacctgattatcctgcctctggccttcggcaagagacagggcagagagttcatctggaacgatctgctgagcctggaaaccggctctctgaagctggccaatggcagagtgatcgagaaaaccctgtacaacaggagaaccagacaggacgagcctgctctgtttgtggccctgaccttcgagagaagagaggtgctggacagcagcaacatcaagcccatgaacctgatcggcgtggaccggggcgagaatatccctgctgtgatcgccctgacagaccctgaaggatgcccactgagcagattcaaggactccctgggcaaccctacacacatcctgagaatcggcgagagctacaaagagaagcagaggacaatccaggccaagaaagaggtggaacagagaagagccggcggatactctaggaagtacgccagcaaggccaagaatctggccgacgacatggtccgaaacaccgccagagatctgctgtactacgccgtgacacaggacgccatgctgatcttcgagaatctgagcagaggcttcggccggcagggcaagagaacctttatggccgagaggcagtacaccagaatggaagattggctcacagctaaactggcctacgagggactgagcaagacctacctgtccaaaacactggcccagtatacctccaagacctgcagcaattgcggcttcaccatcaccagcgccgactacgacagagtgctggaaaagctcaagaaaaccgccaccggctggatgaccaccatcaacggcaaagagctgaaggttgagggccagatcacctactacaacaggtacaagaggcagaacgtcgtgaaggatctgagcgtggaactggacagactgagcgaagagagcgtgaacaacgacatcagcagctggacaaagggcagatcaggcgaggctctgagcctgctgaagaagaggtttagccacagacctgtgcaagagaagttcgtgtgcctgaactgcggcttcgagacacacgccgatgaacaggctgccctgaacattgccagaagctggctgttcctgagaagccaagagtacaagaagtaccagaccaacaagaccaccggcaacaccgacaagagggcctttgtggaaacctggcagagcttctacagaaaaaagctgaaagaagtctggaagcccgccgtg

SEQ ID NO: 216 - protein, 977 aa, synthetic construct; identical to SEQ ID NO: 126
  REGION 1..977: note = CasX variant 491

SEQ ID NO: 217 - protein, 987 aa, synthetic construct
  REGION 1..987: note = CasX variant 278
MAPKKKRKVSRQEIKRINKIRRRLVKDSNTKKAGKTGPMKTLLVRVMTPDLRERLENLRKKPENIPQPISNTSRANLNKLLTDYTEMKKAILHVYWEEFQKDPVGLMSRVAQPAPKNIDQRKLIPVKDGNERLTSSGFACSQCCQPLYVYKLEQVNDKGKPHTNYFGRCNVSEHERLILLSPHKPEANDELVTYSLGKFGQRALDFYSIHVTRESNHPVKPLEQIGGNSCASGPVGKALSDACMGAVASFLTKYQDIILEHQKVIKKNEKRLANLKDIASANGLAFPKITLPPQPHTKEGIEAYNNVVAQIVIWVNLNLWQKLKIGRDEAKPLQRLKGFPSFPLVERQANEVDWWDMVCNVKKLINEKKEDGKVFWQNLAGYKRQEALRPYLSSEEDRKKGKKFARYQFGDLLLHLEKKHGEDWGKVYDEAWERIDKKVEGLSKHIKLEEERRSEDAQSKAALTDWLRAKASFVIEGLKEADKDEFCRCELKLQKWYGDLRGKPFAIEAENSILDISGFSKQYNCAFIWQKDGVKKLNLYLIINYFKGGKLRFKKIKPEAFEANRFYTVINKKSGEIVPMEVNFNFDDPNLIILPLAFGKRQGREFIWNDLLSLETGSLKLANGRVIEKTLYNRRTRQDEPALFVALTFERREVLDSSNIKPMNLIGIDRGENIPAVIALTDPEGCPLSRFKDSLGNPTHILRIGESYKEKQRTIQAKKEVEQRRAGGYSRKYASKAKNLADDMVRNTARDLLYYAVTQDAMLIFENLSRGFGRQGKRTFMAERQYTRMEDWLTAKLAYEGLSKTYLSKTLAQYTSKTCSNCGFTITSADYDRVLEKLKKTATGWMTTINGKELKVEGQITYYNRYKRQNVVKDLSVELDRLSEESVNNDISSWTKGRSGEALSLLKKRFSHRPVQEKFVCLNCGFETHADEQAALNIARSWLFLRSQEYKKYQTNKTTGNTDKRAFVETWQSFYRKKLKEVWKPAV

SEQ ID NO: 218 - protein, 986 aa, synthetic construct
  REGION 1..986: note = CasX variant 279
MQEIKRINKIRRRLVKDSNTKKAGKTGPMKTLLVRVMTPDLRERLENLRKKPENIPQPISNTSRANLNKLLTDYTEMKKAILHVYWEEFQKDPVGLMSRVAQPAPKNIDQRKLIPVKDGNERLTSSGFACSQCCQPLYVYKLEQVNDKGKPHTNYFGRCNVSEHERLILLSPHKPEANDELVTYSLGKFGQRALDFYSIHVTRESNHPVKPLEQIGGNSCASGPVGKALSDACMGAVASFLTKYQDIILEHQKVIKKNEKRLANLKDIASANGLAFPKITLPPQPHTKEGIEAYNNVVAQIVIWVNLNLWQKLKIGRDEAKPLQRLKGFPSFPLVERQANEVDWWDMVCNVKKLINEKKEDGKVFWQNLAGYKRQEALRPYLSSEEDRKKGKKFARYQFGDLLLHLEKKHGEDWGKVYDEAWERIDKKVEGLSKHIKLEEERRSEDAQSKAALTDWLRAKASFVIEGLKEADKDEFCRCELKLQKWYGDLRGKPFAIEAENSILDISGFSKQYNCAFIWQKDGVKKLNLYLIINYFKGGKLRFKKIKPEAFEANRFYTVINKKSGEIVPMEVNFNFDDPNLIILPLAFGKRQGREFIWNDLLSLETGSLKLANGRVIEKTLYNRRTRQDEPALFVALTFERREVLDSSNIKPMNLIGIDRGENIPAVIALTDPEGCPLSRFKDSLGNPTHILRIGESYKEKQRTIQAKKEVEQRRAGGYSRKYASKAKNLADDMVRNTARDLLYYAVTQDAMLIFENLSRGFGRQGKRTFMAERQYTRMEDWLTAKLAYEGLSKTYLSKTLAQYTSKTCSNCGFTITSADYDRVLEKLKKTATGWMTTINGKELKVEGQITYYNRYKRQNVVKDLSVELDRLSEESVNNDISSWTKGRSGEALSLLKKRFSHRPVQEKFVCLNCGFETHADEQAALNIARSWLFLRSQEYKKYQTNKTTGNTDKRAFVETWQSFYRKKLKEVWKPAVTSPKKKRKV

SEQ ID NO: 219 - protein, 996 aa, synthetic construct
  REGION 1..996: note = CasX variant 280
MQEIKRINKIRRRLVKDSNTKKAGKTGPMKTLLVRVMTPDLRERLENLRKKPENIPQPISNTSRANLNKLLTDYTEMKKAILHVYWEEFQKDPVGLMSRVAQPAPKNIDQRKLIPVKDGNERLTSSGFACSQCCQPLYVYKLEQVNDKGKPHTNYFGRCNVSEHERLILLSPHKPEANDELVTYSLGKFGQRALDFYSIHVTRESNHPVKPLEQIGGNSCASGPVGKALSDACMGAVASFLTKYQDIILEHQKVIKKNEKRLANLKDIASANGLAFPKITLPPQPHTKEGIEAYNNVVAQIVIWVNLNLWQKLKIGRDEAKPLQRLKGFPSFPLVERQANEVDWWDMVCNVKKLINEKKEDGKVFWQNLAGYKRQEALRPYLSSEEDRKKGKKFARYQFGDLLLHLEKKHGEDWGKVYDEAWERIDKKVEGLSKHIKLEEERRSEDAQSKAALTDWLRAKASFVIEGLKEADKDEFCRCELKLQKWYGDLRGKPFAIEAENSILDISGFSKQYNCAFIWQKDGVKKLNLYLIINYFKGGKLRFKKIKPEAFEANRFYTVINKKSGEIVPMEVNFNFDDPNLIILPLAFGKRQGREFIWNDLLSLETGSLKLANGRVIEKTLYNRRTRQDEPALFVALTFERREVLDSSNIKPMNLIGIDRGENIPAVIALTDPEGCPLSRFKDSLGNPTHILRIGESYKEKQRTIQAKKEVEQRRAGGYSRKYASKAKNLADDMVRNTARDLLYYAVTQDAMLIFENLSRGFGRQGKRTFMAERQYTRMEDWLTAKLAYEGLSKTYLSKTLAQYTSKTCSNCGFTITSADYDRVLEKLKKTATGWMTTINGKELKVEGQITYYNRYKRQNVVKDLSVELDRLSEESVNNDISSWTKGRSGEALSLLKKRFSHRPVQEKFVCLNCGFETHADEQAALNIARSWLFLRSQEYKKYQTNKTTGNTDKRAFVETWQSFYRKKLKEVWKPAVTSPKKKRKVPPPPKKKRKV

SEQ ID NO: 220 - protein, 1006 aa, synthetic construct
  REGION 1..1006: note = CasX variant 285
MQEIKRINKIRRRLVKDSNTKKAGKTGPMKTLLVRVMTPDLRERLENLRKKPENIPQPISNTSRANLNKLLTDYTEMKKAILHVYWEEFQKDPVGLMSRVAQPAPKNIDQRKLIPVKDGNERLTSSGFACSQCCQPLYVYKLEQVNDKGKPHTNYFGRCNVSEHERLILLSPHKPEANDELVTYSLGKFGQRALDFYSIHVTRESNHPVKPLEQIGGNSCASGPVGKALSDACMGAVASFLTKYQDIILEHQKVIKKNEKRLANLKDIASANGLAFPKITLPPQPHTKEGIEAYNNVVAQIVIWVNLNLWQKLKIGRDEAKPLQRLKGFPSFPLVERQANEVDWWDMVCNVKKLINEKKEDGKVFWQNLAGYKRQEALRPYLSSEEDRKKGKKFARYQFGDLLLHLEKKHGEDWGKVYDEAWERIDKKVEGLSKHIKLEEERRSEDAQSKAALTDWLRAKASFVIEGLKEADKDEFCRCELKLQKWYGDLRGKPFAIEAENSILDISGFSKQYNCAFIWQKDGVKKLNLYLIINYFKGGKLRFKKIKPEAFEANRFYTVINKKSGEIVPMEVNFNFDDPNLIILPLAFGKRQGREFIWNDLLSLETGSLKLANGRVIEKTLYNRRTRQDEPALFVALTFERREVLDSSNIKPMNLIGIDRGENIPAVIALTDPEGCPLSRFKDSLGNPTHILRIGESYKEKQRTIQAKKEVEQRRAGGYSRKYASKAKNLADDMVRNTARDLLYYAVTQDAMLIFENLSRGFGRQGKRTFMAERQYTRMEDWLTAKLAYEGLSKTYLSKTLAQYTSKTCSNCGFTITSADYDRVLEKLKKTATGWMTTINGKELKVEGQITYYNRYKRQNVVKDLSVELDRLSEESVNNDISSWTKGRSGEALSLLKKRFSHRPVQEKFVCLNCGFETHADEQAALNIARSWLFLRSQEYKKYQTNKTTGNTDKRAFVETWQSFYRKKLKEVWKPAVTSPKKKRKVPPPHKKKHPDASVNFSEFSK

SEQ ID NO: 221 - protein, 1007 aa, synthetic construct
  REGION 1..1007: note = CasX variant 286
MQEIKRINKIRRRLVKDSNTKKAGKTGPMKTLLVRVMTPDLRERLENLRKKPENIPQPISNTSRANLNKLLTDYTEMKKAILHVYWEEFQKDPVGLMSRVAQPAPKNIDQRKLIPVKDGNERLTSSGFACSQCCQPLYVYKLEQVNDKGKPHTNYFGRCNVSEHERLILLSPHKPEANDELVTYSLGKFGQRALDFYSIHVTRESNHPVKPLEQIGGNSCASGPVGKALSDACMGAVASFLTKYQDIILEHQKVIKKNEKRLANLKDIASANGLAFPKITLPPQPHTKEGIEAYNNVVAQIVIWVNLNLWQKLKIGRDEAKPLQRLKGFPSFPLVERQANEVDWWDMVCNVKKLINEKKEDGKVFWQNLAGYKRQEALRPYLSSEEDRKKGKKFARYQFGDLLLHLEKKHGEDWGKVYDEAWERIDKKVEGLSKHIKLEEERRSEDAQSKAALTDWLRAKASFVIEGLKEADKDEFCRCELKLQKWYGDLRGKPFAIEAENSILDISGFSKQYNCAFIWQKDGVKKLNLYLIINYFKGGKLRFKKIKPEAFEANRFYTVINKKSGEIVPMEVNFNFDDPNLIILPLAFGKRQGREFIWNDLLSLETGSLKLANGRVIEKTLYNRRTRQDEPALFVALTFERREVLDSSNIKPMNLIGIDRGENIPAVIALTDPEGCPLSRFKDSLGNPTHILRIGESYKEKQRTIQAKKEVEQRRAGGYSRKYASKAKNLADDMVRNTARDLLYYAVTQDAMLIFENLSRGFGRQGKRTFMAERQYTRMEDWLTAKLAYEGLSKTYLSKTLAQYTSKTCSNCGFTITSADYDRVLEKLKKTATGWMTTINGKELKVEGQITYYNRYKRQNVVKDLSVELDRLSEESVNNDISSWTKGRSGEALSLLKKRFSHRPVQEKFVCLNCGFETHADEQAALNIARSWLFLRSQEYKKYQTNKTTGNTDKRAFVETWQSFYRKKLKEVWKPAVTSPKKKRKVPPPQRPGPYDRPQRPGPYDRP

SEQ ID NO: 222 - protein, 1005 aa, synthetic construct
  REGION 1..1005: note = CasX variant 287
MQEIKRINKIRRRLVKDSNTKKAGKTGPMKTLLVRVMTPDLRERLENLRKKPENIPQPISNTSRANLNKLLTDYTEMKKAILHVYWEEFQKDPVGLMSRVAQPAPKNIDQRKLIPVKDGNERLTSSGFACSQCCQPLYVYKLEQVNDKGKPHTNYFGRCNVSEHERLILLSPHKPEANDELVTYSLGKFGQRALDFYSIHVTRESNHPVKPLEQIGGNSCASGPVGKALSDACMGAVASFLTKYQDIILEHQKVIKKNEKRLANLKDIASANGLAFPKITLPPQPHTKEGIEAYNNVVAQIVIWVNLNLWQKLKIGRDEAKPLQRLKGFPSFPLVERQANEVDWWDMVCNVKKLINEKKEDGKVFWQNLAGYKRQEALRPYLSSEEDRKKGKKFARYQFGDLLLHLEKKHGEDWGKVYDEAWERIDKKVEGLSKHIKLEEERRSEDAQSKAALTDWLRAKASFVIEGLKEADKDEFCRCELKLQKWYGDLRGKPFAIEAENSILDISGFSKQYNCAFIWQKDGVKKLNLYLIINYFKGGKLRFKKIKPEAFEANRFYTVINKKSGEIVPMEVNFNFDDPNLIILPLAFGKRQGREFIWNDLLSLETGSLKLANGRVIEKTLYNRRTRQDEPALFVALTFERREVLDSSNIKPMNLIGIDRGENIPAVIALTDPEGCPLSRFKDSLGNPTHILRIGESYKEKQRTIQAKKEVEQRRAGGYSRKYASKAKNLADDMVRNTARDLLYYAVTQDAMLIFENLSRGFGRQGKRTFMAERQYTRMEDWLTAKLAYEGLSKTYLSKTLAQYTSKTCSNCGFTITSADYDRVLEKLKKTATGWMTTINGKELKVEGQITYYNRYKRQNVVKDLSVELDRLSEESVNNDISSWTKGRSGEALSLLKKRFSHRPVQEKFVCLNCGFETHADEQAALNIARSWLFLRSQEYKKYQTNKTTGNTDKRAFVETWQSFYRKKLKEVWKPAVTSPKKKRKVPPPLSPSLSPLLSPSLSPL

SEQ ID NO: 223 - protein, 1008 aa, synthetic construct
  REGION 1..1008: note = CasX variant 288
MQEIKRINKIRRRLVKDSNTKKAGKTGPMKTLLVRVMTPDLRERLENLRKKPENIPQPISNTSRANLNKLLTDYTEMKKAILHVYWEEFQKDPVGLMSRVAQPAPKNIDQRKLIPVKDGNERLTMSSGFACSQCCQPLYVYKLEQVNDKGKPHTNYFGRCNVSEHERLILLSPHKPEANDELVTYSLGKFGQRALDFYSIHVTRESNHPVKPLEQIGGNSCASGPVGKALSDACMGAVASFLTKYQDIILEHQKVIKKNEKRLANLKDIASANGLAFPKITLPPQPHTKEGIEAYNNVVAQIVIWVNLNLWQKLKIGRDEAKPLQRLKGFPSFPLVERQANEVDWWDMVCNVKKLINEKKEDGKVFWQNLAGYKRQEALRPYLSSEEDRKKGKKFARYQFGDLLLHLEKKHGEDWGKVYDEAWERIDKKVEGLSKHIKLEEERRSEDAQSKAALTDWLRAKASFVIEGLKEADKDEFCRCELKLQKWYGDLRGKPFAIEAENSILDISGFSKQYNCAFIWQKDGVKKLNLYLIINYFKGGKLRFKKIKPEAFEANRFYTVINKKSGEIVPMEVNFNFDDPNLIILPLAFGKRQGREFIWNDLLSLETGSLKLANGRVIEKTLYNRRTRQDEPALFVALTFERREVLDSSNIKPMNLIGIDRGENIPAVIALTDPEGCPLSRFKDSLGNPTHILRIGESYKEKQRTIQAKKEVEQRRAGGYSRKYASKAKNLADDMVRNTARDLLYYAVTQDAMLIFENLSRGFGRQGKRTFMAERQYTRMEDWLTAKLAYEGLSKTYLSKTLAQYTSKTCSNCGFTITSADYDRVLEKLKKTATGWMTTINGKELKVEGQITYYNRYKRQNVVKDLSVELDRLSEESVNNDISSWTKGRSGEALSLLKKRFSHRPVQEKFVCLNCGFETHADEQAALNIARSWLFLRSQEYKKYQTNKTTGNTDKRAFVETWQSFYRKKLKEVWKPAVTSPKKKRKVPPPRGKGGKGLGKGGAKRHRK

SEQ ID NO: 224 - protein, 1013 aa, synthetic construct
  REGION 1..1013: note = CasX variant 290
MQEIKRINKIRRRLVKDSNTKKAGKTGPMKTLLVRVMTPDLRERLENLRKKPENIPQPISNTSRANLNKLLTDYTEMKKAILHVYWEEFQKDPVGLMSRVAQPAPKNIDQRKLIPVKDGNERLTSSGFACSQCCQPLYVYKLEQVNDKGKPHTNYFGRCNVSEHERLILLSPHKPEANDELVTYSLGKFGQRALDFYSIHVTRESNHPVKPLEQIGGNSCASGPVGKALSDACMGAVASFLTKYQDIILEHQKVIKKNEKRLANLKDIASANGLAFPKITLPPQPHTKEGIEAYNNVVAQIVIWVNLNLWQKLKIGRDEAKPLQRLKGFPSFPLVERQANEVDWWDMVCNVKKLINEKKEDGKVFWQNLAGYKRQEALRPYLSSEEDRKKGKKFARYQFGDLLLHLEKKHGEDWGKVYDEAWERIDKKVEGLSKHIKLEEERRSEDAQSKAALTDWLRAKASFVIEGLKEADKDEFCRCELKLQKWYGDLRGKPFAIEAENSILDISGFSKQYNCAFIWQKDGVKKLNLYLIINYFKGGKLRFKKIKPEAFEANRFYTVINKKSGEIVPMEVNFNFDDPNLIILPLAFGKRQGREFIWNDLLSLETGSLKLANGRVIEKTLYNRRTRQDEPALFVALTFERREVLDSSNIKPMNLIGIDRGENIPAVIALTDPEGCPLSRFKDSLGNPTHILRIGESYKEKQRTIQAKKEVEQRRAGGYSRKYASKAKNLADDMVRNTARDLLYYAVTQDAMLIFENLSRGFGRQGKRTFMAERQYTRMEDWLTAKLAYEGLSKTYLSKTLAQYTSKTCSNCGFTITSADYDRVLEKLKKTATGWMTTINGKELKVEGQITYYNRYKRQNVVKDLSVELDRLSEESVNNDISSWTKGRSGEALSLLKKRFSHRPVQEKFVCLNCGFETHADEQAALNIARSWLFLRSQEYKKYQTNKTTGNTDKRAFVETWQSFYRKKLKEVWKPAVTSPKKKRKVPPPSRRRKANPTKLSENAKKLAKEVEN

SEQ ID NO: 225 - protein, 998 aa, synthetic construct
  REGION 1..998: note = CasX variant 291
MQEIKRINKIRRRLVKDSNTKKAGKTGPMKTLLVRVMTPDLRERLENLRKKPENIPQPISNTSRANLNKLLTDYTEMKKAILHVYWEEFQKDPVGLMSRVAQPAPKNIDQRKLIPVKDGNERLTSSGFACSQCCQPLYVYKLEQVNDKGKPHTNYFGRCNVSEHERLILLSPHKPEANDELVTYSLGKFGQRALDFYSIHVTRESNHPVKPLEQIGGNSCASGPVGKALSDACMGAVASFLTKYQDIILEHQKVIKKNEKRLANLKDIASANGLAFPKITLPPQPHTKEGIEAYNNVVAQIVIWVNLNLWQKLKIGRDEAKPLQRLKGFPSFPLVERQANEVDWWDMVCNVKKLINEKKEDGKVFWQNLAGYKRQEALRPYLSSEEDRKKGKKFARYQFGDLLLHLEKKHGEDWGKVYDEAWERIDKKVEGLSKHIKLEEERRSEDAQSKAALTDWLRAKASFVIEGLKEADKDEFCRCELKLQKWYGDLRGKPFAIEAENSILDISGFSKQYNCAFIWQKDGVKKLNLYLIINYFKGGKLRFKKIKPEAFEANRFYTVINKKSGEIVPMEVNFNFDDPNLIILPLAFGKRQGREFIWNDLLSLETGSLKLANGRVIEKTLYNRRTRQDEPALFVALTFERREVLDSSNIKPMNLIGIDRGENIPAVIALTDPEGCPLSRFKDSLGNPTHILRIGESYKEKQRTIQAKKEVEQRRAGGYSRKYASKAKNLADDMVRNTARDLLYYAVTQDAMLIFENLSRGFGRQGKRTFMAERQYTRMEDWLTAKLAYEGLSKTYLSKTLAQYTSKTCSNCGFTITSADYDRVLEKLKKTATGWMTTINGKELKVEGQITYYNRYKRQNVVKDLSVELDRLSEESVNNDISSWTKGRSGEALSLLKKRFSHRPVQEKFVCLNCGFETHADEQAALNIARSWLFLRSQEYKKYQTNKTTGNTDKRAFVETWQSFYRKKLKEVWKPAVTSPKKKRKVPPPPAAKRVKLD

SEQ ID NO: 226 - protein, 997 aa, synthetic construct
  REGION 1..997: note = CasX variant 293
MQEIKRINKIRRRLVKDSNTKKAGKTGPMKTLLVRVMTPDLRERLENLRKKPENIPQPISNTSRANLNKLLTDYTEMKKAILHVYWEEFQKDPVGLMSRVAQPAPKNIDQRKLIPVKDGNERLTSSGFACSQCCQPLYVYKLEQVNDKGKPHTNYFGRCNVSEHERLILLSPHKPEANDELVTYSLGKFGQRALDFYSIHVTRESNHPVKPLEQIGGNSCASGPVGKALSDACMGAVASFLTKYQDIILEHQKVIKKNEKRLANLKDIASANGLAFPKITLPPQPHTKEGIEAYNNVVAQIVIWVNLNLWQKLKIGRDEAKPLQRLKGFPSFPLVERQANEVDWWDMVCNVKKLINEKKEDGKVFWQNLAGYKRQEALRPYLSSEEDRKKGKKFARYQFGDLLLHLEKKHGEDWGKVYDEAWERIDKKVEGLSKHIKLEEERRSEDAQSKAALTDWLRAKASFVIEGLKEADKDEFCRCELKLQKWYGDLRGKPFAIEAENSILDISGFSKQYNCAFIWQKDGVKKLNLYLIINYFKGGKLRFKKIKPEAFEANRFYTVINKKSGEIVPMEVNFNFDDPNLIILPLAFGKRQGREFIWNDLLSLETGSLKLANGRVIEKTLYNRRTRQDEPALFVALTFERREVLDSSNIKPMNLIGIDRGENIPAVIALTDPEGCPLSRFKDSLGNPTHILRIGESYKEKQRTIQAKKEVEQRRAGGYSRKYASKAKNLADDMVRNTARDLLYYAVTQDAMLIFENLSRGFGRQGKRTFMAERQYTRMEDWLTAKLAYEGLSKTYLSKTLAQYTSKTCSNCGFTITSADYDRVLEKLKKTATGWMTTINGKELKVEGQITYYNRYKRQNVVKDLSVELDRLSEESVNNDISSWTKGRSGEALSLLKKRFSHRPVQEKFVCLNCGFETHADEQAALNIARSWLFLRSQEYKKYQTNKTTGNTDKRAFVETWQSFYRKKLKEVWKPAVTSPKKKRKVPPPKRSFSKAF

SEQ ID NO: 227 - protein, 1008 aa, synthetic construct
  REGION 1..1008: note = CasX variant 300
MQEIKRINKIRRRLVKDSNTKKAGKTGPMKTLLVRVMTPDLRERLENLRKKPENIPQPISNTSRANLNKLLTDYTEMKKAILHVYWEEFQKDPVGLMSRVAQPAPKNIDQRKLIPVKDGNERLTSSGFACSQCCQPLYVYKLEQVNDKGKPHTNYFGRCNVSEHERLILLSPHKPEANDELVTYSLGKFGQRALDFYSIHVTRESNHPVKPLEQIGGNSCASGPVGKALSDACMGAVASFLTKYQDIILEHQKVIKKNEKRLANLKDIASANGLAFPKITLPPQPHTKEGIEAYNNVVAQIVIWVNLNLWQKLKIGRDEAKPLQRLKGFPSFPLVERQANEVDWWDMVCNVKKLINEKKEDGKVFWQNLAGYKRQEALRPYLSSEEDRKKGKKFARYQFGDLLLHLEKKHGEDWGKVYDEAWERIDKKVEGLSKHIKLEEERRSEDAQSKAALTDWLRAKASFVIEGLKEADKDEFCRCELKLQKWYGDLRGKPFAIEAENSILDISGFSKQYNCAFIWQKDGVKKLNLYLIINYFKGGKLRFKKIKPEAFEANRFYTVINKKSGEIVPMEVNFNFDDPNLIILPLAFGKRQGREFIWNDLLSLETGSLKLANGRVIEKTLYNRRTRQDEPALFVALTFERREVLDSSNIKPMNLIGIDRGENIPAVIALTDPEGCPLSRFKDSLGNPTHILRIGESYKEKQRTIQAKKEVEQRRAGGYSRKYASKAKNLADDMVRNTARDLLYYAVTQDAMLIFENLSRGFGRQGKRTFMAERQYTRMEDWLTAKLAYEGLSKTYLSKTLAQYTSKTCSNCGFTITSADYDRVLEKLKKTATGWMTTINGKELKVEGQITYYNRYKRQNVVKDLSVELDRLSEESVNNDISSWTKGRSGEALSLLKKRFSHRPVQEKFVCLNCGFETHADEQAALNIARSWLFLRSQEYKKYQTNKTTGNTDKRAFVETWQSFYRKKLKEVWKPAVTSPKKKRKVPPPKRGINDRNFWRGENERKTR

SEQ ID NO: 228 - protein, 1007 aa, synthetic construct
  REGION 1..1007: note = CasX variant 492
MAPKKKRKVSRMQEIKRINKIRRRLVKDSNTKKAGKTGPMKTLLVRVMTPDLRERLENLRKKPENIPQPISNTSRANLNKLLTDYTEMKKAILHVYWEEFQKDPVGLMSRVAQPAPKNIDQRKLIPVKDGNERLTSSGFACSQCCQPLYVYKLEQVNDKGKPHTNYFGRCNVSEHERLILLSPHKPEANDELVTYSLGKFGQRALDFYSIHVTRESNHPVKPLEQIGGNSCASGPVGKALSDACMGAVASFLTKYQDIILEHQKVIKKNEKRLANLKDIASANGLAFPKITLPPQPHTKEGIEAYNNVVAQIVIWVNLNLWQKLKIGRDEAKPLQRLKGFPSFPLVERQANEVDWWDMVCNVKKLINEKKEDGKVFWQNLAGYKRQEALRPYLSSEEDRKKGKKFARYQFGDLLLHLEKKHGEDWGKVYDEAWERIDKKVEGLSKHIKLEEERRSEDAQSKAALTDWLRAKASFVIEGLKEADKDEFCRCELKLQKWYGDLRGKPFAIEAENSILDISGFSKQYNCAFIWQKDGVKKLNLYLIINYFKGGKLRFKKIKPEAFEANRFYTVINKKSGEIVPMEVNFNFDDPNLIILPLAFGKRQGREFIWNDLLSLETGSLKLANGRVIEKTLYNRRTRQDEPALFVALTFERREVLDSSNIKPMNLIGIDRGENIPAVIALTDPEGCPLSRFKDSLGNPTHILRIGESYKEKQRTIQAKKEVEQRRAGGYSRKYASKAKNLADDMVRNTARDLLYYAVTQDAMLIFENLSRGFGRQGKRTFMAERQYTRMEDWLTAKLAYEGLSKTYLSKTLAQYTSKTCSNCGFTITSADYDRVLEKLKKTATGWMTTINGKELKVEGQITYYNRYKRQNVVKDLSVELDRLSEESVNNDISSWTKGRSGEALSLLKKRFSHRPVQEKFVCLNCGFETHADEQAALNIARSWLFLRSQEYKKYQTNKTTGNTDKRAFVETWQSFYRKKLKEVWKPAVTSPKKKRKVPPPPKKKRKV

SEQ ID NO: 229 - protein, 1009 aa, synthetic construct
  REGION 1..1009: note = CasX variant 493
MAPKKKRKVSRMQEIKRINKIRRRLVKDSNTKKAGKTGPMKTLLVRVMTPDLRERLENLRKKPENIPQPISNTSRANLNKLLTDYTEMKKAILHVYWEEFQKDPVGLMSRVAQPAPKNIDQRKLIPVKDGNERLTSSGFACSQCCQPLYVYKLEQVNDKGKPHTNYFGRCNVSEHERLILLSPHKPEANDELVTYSLGKFGQRALDFYSIHVTRESNHPVKPLEQIGGNSCASGPVGKALSDACMGAVASFLTKYQDIILEHQKVIKKNEKRLANLKDIASANGLAFPKITLPPQPHTKEGIEAYNNVVAQIVIWVNLNLWQKLKIGRDEAKPLQRLKGFPSFPLVERQANEVDWWDMVCNVKKLINEKKEDGKVFWQNLAGYKRQEALRPYLSSEEDRKKGKKFARYQFGDLLLHLEKKHGEDWGKVYDEAWERIDKKVEGLSKHIKLEEERRSEDAQSKAALTDWLRAKASFVIEGLKEADKDEFCRCELKLQKWYGDLRGKPFAIEAENSILDISGFSKQYNCAFIWQKDGVKKLNLYLIINYFKGGKLRFKKIKPEAFEANRFYTVINKKSGEIVPMEVNFNFDDPNLIILPLAFGKRQGREFIWNDLLSLETGSLKLANGRVIEKTLYNRRTRQDEPALFVALTFERREVLDSSNIKPMNLIGIDRGENIPAVIALTDPEGCPLSRFKDSLGNPTHILRIGESYKEKQRTIQAKKEVEQRRAGGYSRKYASKAKNLADDMVRNTARDLLYYAVTQDAMLIFENLSRGFGRQGKRTFMAERQYTRMEDWLTAKLAYEGLSKTYLSKTLAQYTSKTCSNCGFTITSADYDRVLEKLKKTATGWMTTINGKELKVEGQITYYNRYKRQNVVKDLSVELDRLSEESVNNDISSWTKGRSGEALSLLKKRFSHRPVQEKFVCLNCGFETHADEQAALNIARSWLFLRSQEYKKYQTNKTTGNTDKRAFVETWQSFYRKKLKEVWKPAVTSPKKKRKVPPPPAAKRVKLD

SEQ ID NO: 230 - DNA, 21 bp, Betapolyomavirus macaca mulatta polyomavirus 1
  source 1..21: mol_type = other DNA
ccaaagaagaagcggaaggtc

SEQ ID NO: 231 - DNA, 51 bp, unidentified
  misc_feature 1..51: note = nuclear localization signal
  source 1..51: mol_type = other DNA
cacaagaagaaacatccagacgcatcagtcaactttagcgagttcagtaaa

SEQ ID NO: 232 - DNA, 54 bp, unidentified
  misc_feature 1..54: note = nuclear localization signal
  source 1..54: mol_type = other DNA
cagcgccctgggccttacgataggccgcaaagacccggaccgtatgatcgccct

SEQ ID NO: 233 - DNA, 48 bp, unidentified
  misc_feature 1..48: note = nuclear localization signal
  source 1..48: mol_type = other DNA
ctcagcccgagtcttagtccactgctttccccgtccctgtctccactg

SEQ ID NO: 234 - DNA, 54 bp, unidentified
  misc_feature 1..54: note = nuclear localization signal
  source 1..54: mol_type = other DNA
cggggcaagggtggcaaggggcttggcaaggggggggcaaagaggcacaggaag

SEQ ID NO: 235 - DNA, 72 bp, Caenorhabditis elegans
  source 1..72: mol_type = other DNA
agccgccgcagaaaagccaatcctacaaaactgtcagaaaatgcgaaaaaacttgctaaggaggtggaaaac

SEQ ID NO: 236 - DNA, 27 bp, Homo sapiens
  source 1..27: mol_type = other DNA
cctgccgcaaagcgagtgaaattggac

SEQ ID NO: 237 - DNA, 24 bp, unidentified
  misc_feature 1..24: note = nuclear localization signal
  source 1..24: mol_type = other DNA
aagcggtccttcagtaaggccttt

SEQ ID NO: 238 - DNA, 57 bp, Alphainfluenzavirus influenza A virus
  source 1..57: mol_type = other DNA
aaacggggaataaacgaccggaacttctggcgcggggaaaacgagcgcaaaacccga

SEQ ID NO: 239 - DNA, 2991 bp, synthetic construct
  misc_feature 1..2991: note = CasX variant 387
  source 1..2991: mol_type = other DNA
atggccccaaagaagaagcggaaggtctctagacaagagatcaagagaatcaacaagatcagaaggagactggtcaaggacagcaacacaaagaaggccggcaagacaggccccatgaaaaccctgctcgtcagagtgatgacccctgacctgagagagcggctggaaaacctgagaaagaagcccgagaacatccctcagcctatcagcaacaccagcagggccaacctgaacaagctgctgaccgactacaccgagatgaagaaagccatcctgcacgtgtactgggaagagttccagaaagaccccgtgggcctgatgagcagagttgctcagcctgccagcaagaagatcgaccagaacaagctgaagcccgagatggacgagaagggcaatctgaccacagccggctttgcctgctctcagtgtggccagcctctgttcgtgtacaagctggaacaggtgtccgagaaaggcaaggcctacaccaactacttcggcagatgtaacgtggccgagcacgagaagctgattctgctggcccagctgaaacctgagaaggactctgatgaggccgtgacctacagcctgggcaagtttggacagagagccctggacttctacagcatccacgtgaccagggagagcaatcaccctgtgaagcccctggaacagatcggcggcaatagctgtgcctctggacctgtgggaaaagccctgagcgacgcctgtatgggagccgtggcatccttcctgaccaagtaccaggacatcatcctggaacaccagaaagtgatcaagaagaacgagaaaagactggccaacctcaaggatatcgccagcgctaacggcctggcctttcctaagatcaccctgcctccacagcctcacaccaaagagggcatcgaggcctacaacaacgtggtggcccagatcgtgatttgggtcaacctgaatctgtggcagaagctgaagatcggcagggacgaagccaagccactgcagagactgaagggcttccctagcttccctctggtggaaagacaggccaatgaagtggattggtgggacatggtctgcaacgtgaagaagctgatcaacgagaagaaagaggatggcaaggttttctggcagaacctggccggctacaagagacaagaagccctgaggccttacctgagcagcgaagaggaccggaagaagggcaagaagttcgccagataccagttcggcgacctgctgctgcacctggaaaagaagcacggcgaggactggggcaaagtgtacgatgaggcctgggagagaatcgacaagaaggtggaaggcctgagcaagcacattaagctggaagaggaaagaaggagcgaggacgcccaatctaaagccgctctgaccgattggctgagagccaaggccagctttgtgatcgagggcctgaaagaggccgacaaggacgagttctgcagatgcgagctgaagctgcagaagtggtacggcgatctgagaggcaagcccttcgccattgaggccgagaacagcatcctggacatcagcggcttcagcaagcagtacaactgcgccttcatttggcagaaagacggcgtcaagaaactgaacctgtacctgatcatcaattacttcaaaggcggcaagctgcggttcaagaagatcaaacccgaggccttcgaggctaacagattctacaccgtgatcaacaaaaagtccggcgagatcgtgcccatggaagtgaacttcaacttcgacgaccccaacctgattatcctgcctctggccttcggcaagagacagggcagagagttcatctggaacgatctgctgagcctggaaaccggctctctgaagctggccaatggcagagtgatcgagaaaaccctgtacaacaggagaaccagacaggacgagcctgctctgtttgtggccctgaccttcgagagaagagaggtgctggacagcagcaacatcaagcccatgaacctgatcggcatcgaccggggcgagaatatccctgctgtgatcgccctgacagaccctgaaggatgcccactgagcagattcaaggactccctgggcaaccctacacacatcctgagaatcggcgagagctacaaagagaagcagaggacaatccaggccaagaaagaggtggaacagagaagagccggcggatactctaggaagtacgccagcaaggccaagaatctggccgacgacatggtccgaaacaccgccagagatctgctgtactacgccgtgacacaggacgccatgctgatcttcgagaatctgagcagaggcttcggccggcagggcaagagaacctttatggccgagaggcagtacaccagaatggaagattggctcacagctaaactggcctacgagggactgagcaagacctacctgtccaaaacactggcccagtatacctccaagacctgcagcaattgcggcttcaccatcaccagcgccgactacgacagagtgctggaaaagctcaagaaaaccgccaccggctggatgaccaccatcaacggcaaagagctgaaggttgagggccagatcacctactacaacaggtacaagaggcagaacgtcgtgaaggatctgagcgtggaactggacagactgagcgaagagagcgtgaacaacgacatcagcagctggacaaagggcagatcaggcgaggctctgagcctgctgaagaagaggtttagccacagacctgtgcaagagaagttcgtgtgcctgaactgcggcttcgagacacacgccgatgaacaggctgccctgaacattgccagaagctggctgttcctgagaagccaagagtacaagaagtaccagaccaacaagaccaccggcaacaccgacaagagggcctttgtggaaacctggcagagcttctacagaaaaaagctgaaagaagtctggaagcccgccgtgactagtccaaaaaagaagagaaaggta

SEQ ID NO: 240 - protein, 997 aa, synthetic construct
  REGION 1..997: note = CasX variant 387
MAPKKKRKVSRQEIKRINKIRRRLVKDSNTKKAGKTGPMKTLLVRVMTPDLRERLENLRKKPENIPQPISNTSRANLNKLLTDYTEMKKAILHVYWEEFQKDPVGLMSRVAQPASKKIDQNKLKPEMDEKGNLTTAGFACSQCGQPLFVYKLEQVSEKGKAYTNYFGRCNVAEHEKLILLAQLKPEKDSDEAVTYSLGKFGQRALDFYSIHVTRESNHPVKPLEQIGGNSCASGPVGKALSDACMGAVASFLTKYQDIILEHQKVIKKNEKRLANLKDIASANGLAFPKITLPPQPHTKEGIEAYNNVVAQIVIWVNLNLWQKLKIGRDEAKPLQRLKGFPSFPLVERQANEVDWWDMVCNVKKLINEKKEDGKVFWQNLAGYKRQEALRPYLSSEEDRKKGKKFARYQFGDLLLHLEKKHGEDWGKVYDEAWERIDKKVEGLSKHIKLEEERRSEDAQSKAALTDWLRAKASFVIEGLKEADKDEFCRCELKLQKWYGDLRGKPFAIEAENSILDISGFSKQYNCAFIWQKDGVKKLNLYLIINYFKGGKLRFKKIKPEAFEANRFYTVINKKSGEIVPMEVNFNFDDPNLIILPLAFGKRQGREFIWNDLLSLETGSLKLANGRVIEKTLYNRRTRQDEPALFVALTFERREVLDSSNIKPMNLIGIDRGENIPAVIALTDPEGCPLSRFKDSLGNPTHILRIGESYKEKQRTIQAKKEVEQRRAGGYSRKYASKAKNLADDMVRNTARDLLYYAVTQDAMLIFENLSRGFGRQGKRTFMAERQYTRMEDWLTAKLAYEGLSKTYLSKTLAQYTSKTCSNCGFTITSADYDRVLEKLKKTATGWMTTINGKELKVEGQITYYNRYKRQNVVKDLSVELDRLSEESVNNDISSWTKGRSGEALSLLKKRFSHRPVQEKFVCLNCGFETHADEQAALNIARSWLFLRSQEYKKYQTNKTTGNTDKRAFVETWQSFYRKKLKEVWKPAVTSPKKKRKV

SEQ ID NO: 241 - DNA, 2988 bp, synthetic construct
  misc_feature 1..2988: note = CasX variant 395
  source 1..2988: mol_type = other DNA
atggccccaaagaagaagcggaaggtctctagacaagagatcaagagaatcaacaagatcagaaggagactggtcaaggacagcaacacaaagaaggccggcaagacaggccccatgaaaaccctgctcgtcagagtgatgacccctgacctgagagagcggctggaaaacctgagaaagaagcccgagaacatccctcagcctatcagcaacaccagcagggccaacctgaacaagctgctgaccgactacaccgagatgaagaaagccatcctgcacgtgtactgggaagagttccagaaagaccccgtgggcctgatgagcagagttgctcagcccgctcctaagaacatcgaccagagaaagctgatccccgtgaaggacggcaacgagagactgacctctagcggctttgcctgcagccagtgttgccagcctctgtacgtgtacaagctggaacaagtgaacgacaagggcaagccccacaccaactacttcggcagatgcaacgtgtccgagcacgagaggctgatcctgctgtctcctcacaagcccgaggccaacgatgagctggtcacatacagcctgggcaagttcggacagagagccctggacttctacagcatccacgtgaccaaagaaagcacacaccccgtgaagcccctggctcagatcgccggcaatagatacgcctctggacctgtgggcaaagccctgtccgatgcctgcatgggaacaatcgccagcttcctgagcaagtaccaggacatcatcatcgagcaccagaaggtggtcaagggcaaccagaagagactggaaagcctgagggagctggccggcaaagagaacctggaataccccagcgtgaccctgcctcctcagcctcacacaaaagaaggcgtggacgcctacaacgaagtgatcgccagagtgagaatgtgggtcaacctgaacctgtggcagaagctgaaactgtccagggacgacgccaagcctctgctgagactgaagggcttccctagcttccctctggtggaaagacaggccaatgaagtggattggtgggacatggtctgcaacgtgaagaagctgatcaacgagaagaaagaggatggcaaggttttctggcagaacctggccggctacaagagacaagaagccctgaggccttacctgagcagcgaagaggaccggaagaagggcaagaagttcgccagataccagttcggcgacctgctgctgcacctggaaaagaagcacggcgaggactggggcaaagtgtacgatgaggcctgggagagaatcgacaagaaggtggaaggcctgagcaagcacattaagctggaagaggaaagaaggagcgaggacgcccaatctaaagccgctctgaccgattggctgagagccaaggccagctttgtgatcgagggcctgaaagaggccgacaaggacgagttctgcagatgcgagctgaagctgcagaagtggtacggcgatctgagaggcaagcccttcgccattgaggccgagaacagcatcctggacatcagcggcttcagcaagcagtacaactgcgccttcatttggcagaaagacggcgtcaagaaactgaacctgtacctgatcatcaattacttcaaaggcggcaagctgcggttcaagaagatcaaacccgaggccttcgaggctaacagattctacaccgtgatcaacaaaaagtccggcgagatcgtgcccatggaagtgaacttcaacttcgacgaccccaacctgattatcctgcctctggccttcggcaagagacagggcagagagttcatctggaacgatctgctgagcctggaaaccggctctctgaagctggccaatggcagagtgatcgagaaaaccctgtacaacaggagaaccagacaggacgagcctgctctgtttgtggccctgaccttcgagagaagagaggtgctggacagcagcaacatcaagcccatgaacctgatcggcatcgaccggggcgagaatatccctgctgtgatcgccctgacagaccctgaaggatgcccactgagcagattcaaggactccctgggcaaccctacacacatcctgagaatcggcgagagctacaaagagaagcagaggacaatccaggccaagaaagaggtggaacagagaagagccggcggatactctaggaagtacgccagcaaggccaagaatctggccgacgacatggtccgaaacaccgccagagatctgctgtactacgccgtgacacaggacgccatgctgatcttcgagaatctgagcagaggcttcggccggcagggcaagagaacctttatggccgagaggcagtacaccagaatggaagattggctcacagctaaactggcctacgagggactgagcaagacctacctgtccaaaacactggcccagtatacctccaagacctgcagcaattgcggcttcaccatcaccagcgccgactacgacagagtgctggaaaagctcaagaaaaccgccaccggctggatgaccaccatcaacggcaaagagctgaaggttgagggccagatcacctactacaacaggtacaagaggcagaacgtcgtgaaggatctgagcgtggaactggacagactgagcgaagagagcgtgaacaacgacatcagcagctggacaaagggcagatcaggcgaggctctgagcctgctgaagaagaggtttagccacagacctgtgcaagagaagttcgtgtgcctgaactgcggcttcgagacacacgccgatgaacaggctgccctgaacattgccagaagctggctgttcctgagaagccaagagtacaagaagtaccagaccaacaagaccaccggcaacaccgacaagagggcctttgtggaaacctggcagagcttctacagaaaaaagctgaaagaagtctggaagcccgccgtgactagtccaaaaaagaagagaaaggta

SEQ ID NO: 242 - protein, 1005 aa, synthetic construct
  REGION 1..1005: note = CasX variant 395
MAPKKKRKVSRQEIKRINKIRRRLVKDSNTKKAGKTGPMKTLLVRVMTPDLRERLENLRKKPENIPQPISNTSRANLNKLLTDYTEMKKAILHVYWEEFQKDPVGLMSRVAQPAPKNIDQRKLIPVKDGNERLTSSGFACSQCCQPLYVYKLEQVNDKGKPHTNYFGRCNVSEHERLILLSPHKPEANDELVTYSLGKFGQRALDFYSIHVTKESTHPVKPLAQIAGNRYASGPVGKALSDACMGTIASFLSKYQDIIIEHQKVVKGNQKRLESLRELAGKENLEYPSVTLPPQPHTKEGVDAYNEVIARVRMWVNLNLWQKLKLSRDDAKPLLRLKGFPSFPLVERQANEVDWWDMVCNVKKLINEKKEDGKVFWQNLAGYKRQEALRPYLSSEEDRKKGKKFARYQFGDLLLHLEKKHGEDWGKVYDEAWERIDKKVEGLSKHIKLEEERRSEDAQSKAALTDWLRAKASFVIEGLKEADKDEFCRCELKLQKWYGDLRGKPFAIEAENSILDISGFSKQYNCAFIWQKDGVKKLNLYLIINYFKGGKLRFKKIKPEAFEANRFYTVINKKSGEIVPMEVNFNFDDPNLIILPLAFGKRQGREFIWNDLLSLETGSLKLANGRVIEKTLYNRRTRQDEPALFVALTFERREVLDSSNIKPMNLIGIDRGENIPAVIALTDPEGCPLSRFKDSLGNPTHILRIGESYKEKQRTIQAKKEVEQRRAGGYSRKYASKAKNLADDMVRNTARDLLYYAVTQDAMLIFENLSRGFGRQGKRTFMAERQYTRMEDWLTAKLAYEGLSKTYLSKTLAQYTSKTCSNCGFTITSADYDRVLEKLKKTATGWMTTINGKELKVEGQITYYNRYKRQNVVKDLSVELDRLSEESVNNDISSWTKGRSGEALSLLKKRFSHRPVQEKFVCLNCGFETHADEQAALNIARSWLFLRSQEYKKYQTNKTTGNTDKRAFVETWQSFYRKKLKEVWKPAVTSPKKKRKVTSPKKKRKV

SEQ ID NO: 243 - DNA, 2988 bp, synthetic construct
  misc_feature 1..2988: note = CasX variant 485
  source 1..2988: mol_type = other DNA
atggccccaaagaagaagcggaaggtctctagacaagagatcaagagaatcaacaagatcagaaggagactggtcaaggacagcaacacaaagaaggccggcaagacaggccccatgaaaaccctgctcgtcagagtgatgacccctgacctgagagagcggctggaaaacctgagaaagaagcccgagaacatccctcagcctatcagcaacaccagcagggccaacctgaacaagctgctgaccgactacaccgagatgaagaaagccatcctgcacgtgtactgggaagagttccagaaagaccccgtgggcctgatgagcagagttgctcagcccgctcctaagaacatcgaccagagaaagctgatccccgtgaaggacggcaacgagagactgacctctagcggctttgcctgcagccagtgttgccagcctctgtacgtgtacaagctggaacaagtgaacgacaagggcaagccccacaccaactacttcggcagatgcaacgtgtccgagcacgagaggctgatcctgctgtctcctcacaagcccgaggccaacgatgagctggtcacatacagcctgggcaagttcggacagagagccctggacttctacagcatccacgtgaccaaagaaagcacacaccccgtgaagcccctggctcagatcgccggcaatagatacgcctctggacctgtgggcaaagccctgtccgatgcctgcatgggaacaatcgccagcttcctgagcaagtaccaggacatcatcatcgagcaccagaaggtggtcaagggcaaccagaagagactggaaagcctgagggagctggccggcaaagagaacctggaataccccagcgtgaccctgcctcctcagcctcacacaaaagaaggcgtggacgcctacaacgaagtgatcgccagagtgagaatgtgggtcaacctgaacctgtggcagaagctgaaactgtccagggacgacgccaagcctctgctgagactgaagggcttccctagcttccctctggtggaaagacaggccaatgaagtggattggtgggacatggtctgcaacgtgaagaagctgatcaacgagaagaaagaggatggcaaggttttctggcagaacctggccggctacaagagacaagaagccctgaggccttacctgagcagcgaagaggaccggaagaagggcaagaagttcgccagataccagctgggcgacctgctgctgcacctggaaaagaagcacggcgaggactggggcaaagtgtacgatgaggcctgggagagaatcgacaagaaggtggaaggcctgagcaagcacattaagctggaagaggaaagaaggagcgaggacgcccaatctaaagccgctctgaccgattggctgagagccaaggccagctttgtgatcgagggcctgaaagaggccgacaaggacgagttctgcagatgcgagctgaagctgcagaagtggtacggcgatctgagaggcaagcccttcgccattgaggccgagaacagcatcctggacatcagcggcttcagcaagcagtacaactgcgccttcatttggcagaaagacggcgtcaagaaactgaacctgtacctgatcatcaattacttcaaaggcggcaagctgcggttcaagaagatcaaacccgaggccttcgaggctaacagattctacaccgtgatcaacaaaaagtccggcgagatcgtgcccatggaagtgaacttcaacttcgacgaccccaacctgattatcctgcctctggccttcggcaagagacagggcagagagttcatctggaacgatctgctgagcctggaaaccggctctctgaagctggccaatggcagagtgatcgagaaaaccctgtacaacaggagaaccagacaggacgagcctgctctgtttgtggccctgaccttcgagagaagagaggtgctggacagcagcaacatcaagcccatgaacctgatcggcgtggaccggggcgagaatatccctgctgtgatcgccctgacagaccctgaaggatgcccactgagcagattcaaggactccctgggcaaccctacacacatcctgagaatcggcgagagctacaaagagaagcagaggacaatccaggccaagaaagaggtggaacagagaagagccggcggatactctaggaagtacgccagcaaggccaagaatctggccgacgacatggtccgaaacaccgccagagatctgctgtactacgccgtgacacaggacgccatgctgatcttcgagaatctgagcagaggcttcggccggcagggcaagagaacctttatggccgagaggcagtacaccagaatggaagattggctcacagctaaactggcctacgagggactgagcaagacctacctgtccaaaacactggcccagtatacctccaagacctgcagcaattgcggcttcaccatcaccagcgccgactacgacagagtgctggaaaagctcaagaaaaccgccaccggctggatgaccaccatcaacggcaaagagctgaaggttgagggccagatcacctactacaacaggaggaagaggcagaacgtcgtgaaggatctgagcgtggaactggacagactgagcgaagagagcgtgaacaacgacatcagcagctggacaaagggcagatcaggcgaggctctgagcctgctgaagaagaggtttagccacagacctgtgcaagagaagttcgtgtgcctgaactgcggcttcgagacacacgccgatgaacaggctgccctgaacattgccagaagctggctgttcctgagaagccaagagtacaagaagtaccagaccaacaagaccaccggcaacaccgacaagagggcctttgtggaaacctggcagagcttctacagaaaaaagctgaaagaagtctggaagcccgccgtgactagtccaaaaaagaagagaaaggta

SEQ ID NO: 244 - protein, 996 aa, synthetic construct
  REGION 1..996: note = CasX variant 485
MAPKKKRKVSRQEIKRINKIRRRLVKDSNTKKAGKTGPMKTLLVRVMTPDLRERLENLRKKPENIPQPISNTSRANLNKLLTDYTEMKKAILHVYWEEFQKDPVGLMSRVAQPAPKNIDQRKLIPVKDGNERLTSSGFACSQCCQPLYVYKLEQVNDKGKPHTNYFGRCNVSEHERLILLSPHKPEANDELVTYSLGKFGQRALDFYSIHVTKESTHPVKPLAQIAGNRYASGPVGKALSDACMGTIASFLSKYQDIIIEHQKVVKGNQKRLESLRELAGKENLEYPSVTLPPQPHTKEGVDAYNEVIARVRMWVNLNLWQKLKLSRDDAKPLLRLKGFPSFPLVERQANEVDWWDMVCNVKKLINEKKEDGKVFWQNLAGYKRQEALRPYLSSEEDRKKGKKFARYQLGDLLLHLEKKHGEDWGKVYDEAWERIDKKVEGLSKHIKLEEERRSEDAQSKAALTDWLRAKASFVIEGLKEADKDEFCRCELKLQKWYGDLRGKPFAIEAENSILDISGFSKQYNCAFIWQKDGVKKLNLYLIINYFKGGKLRFKKIKPEAFEANRFYTVINKKSGEIVPMEVNFNFDDPNLIILPLAFGKRQGREFIWNDLLSLETGSLKLANGRVIEKTLYNRRTRQDEPALFVALTFERREVLDSSNIKPMNLIGVDRGENIPAVIALTDPEGCPLSRFKDSLGNPTHILRIGESYKEKQRTIQAKKEVEQRRAGGYSRKYASKAKNLADDMVRNTARDLLYYAVTQDAMLIFENLSRGFGRQGKRTFMAERQYTRMEDWLTAKLAYEGLSKTYLSKTLAQYTSKTCSNCGFTITSADYDRVLEKLKKTATGWMTTINGKELKVEGQITYYNRRKRQNVVKDLSVELDRLSEESVNNDISSWTKGRSGEALSLLKKRFSHRPVQEKFVCLNCGFETHADEQAALNIARSWLFLRSQEYKKYQTNKTTGNTDKRAFVETWQSFYRKKLKEVWKPAVTSPKKKRKV

SEQ ID NO: 245 - DNA, 2988 bp, synthetic construct
  misc_feature 1..2988: note = CasX variant 486
  source 1..2988: mol_type = other DNA
atggccccaaagaagaagcggaaggtctctagacaagagatcaagagaatcaacaagatcagaaggagactggtcaaggacagcaacacaaagaaggccggcaagacaggccccatgaaaaccctgctcgtcagagtgatgacccctgacctgagagagcggctggaaaacctgagaaagaagcccgagaacatccctcagcctatcagcaacaccagcagggccaacctgaacaagctgctgaccgactacaccgagatgaagaaagccatcctgcacgtgtactgggaagagttccagaaagaccccgtgggcctgatgagcagagttgctcagcccgctcctaagaacatcgaccagagaaagctgatccccgtgaaggacggcaacgagagactgacctctagcggctttgcctgcagccagtgttgccagcctctgtacgtgtacaagctggaacaagtgaacgacaagggcaagccccacaccaactacttcggcagatgcaacgtgtccgagcacgagaggctgatcctgctgtctcctcacaagcccgaggccaacgatgagctggtcacatacagcctgggcaagttcggacagagagccctggacttctacagcatccacgtgaccaaagaaagcacacaccccgtgaagcccctggctcagatcgccggcaatagatacgcctctggacctgtgggcaaagccctgtccgatgcctgcatgggaacaatcgccagcttcctgagcaagtaccaggacatcatcatcgagcaccagaaggtggtcaagggcaaccagaagagactggaaagcctgagggagctggccggcaaagagaacctggaataccccagcgtgaccctgcctcctcagcctcacacaaaagaaggcgtggacgcctacaacgaagtgatcgccagagtgagaatgtgggtcaacctgaacctgtggcagaagctgaaactgtccagggacgacgccaagcctctgctgagactgaagggcttccctagcttccctctggtggaaagacaggccaatgaagtggattggtgggacatggtctgcaacgtgaagaagctgatcaacgagaagaaagaggatggcaaggttttctggcagaacctggccggctacaagagacaagaagccctgaggccttacctgagcagcgaagaggaccggaagaagggcaagaagttcgccagataccagctgggcgacctgctgaagcacctggaaaagaagcacggcgaggactggggcaaagtgtacgatgaggcctgggagagaatcgacaagaaggtggaaggcctgagcaagcacattaagctggaagaggaaagaaggagcgaggacgcccaatctaaagccgctctgaccgattggctgagagccaaggccagctttgtgatcgagggcctgaaagaggccgacaaggacgagttctgcagatgcgagctgaagctgcagaagtggtacggcgatctgagaggcaagcccttcgccattgaggccgagaacagcatcctggacatcagcggcttcagcaagcagtacaactgcgccttcatttggcagaaagacggcgtcaagaaactgaacctgtacctgatcatcaattacttcaaaggcggcaagctgcggttcaagaagatcaaacccgaggccttcgaggctaacagattctacaccgtgatcaacaaaaagtccggcgagatcgtgcccatggaagtgaacttcaacttcgacgaccccaacctgattatcctgcctctggccttcggcaagagacagggcagagagttcatctggaacgatctgctgagcctggaaaccggctctctgaagctggccaatggcagagtgatcgagaaaaccctgtacaacaggagaaccagacaggacgagcctgctctgtttgtggccctgaccttcgagagaagagaggtgctggacagcagcaacatcaagcccatgaacctgatcggcgtggaccggggcgagaatatccctgctgtgatcgccctgacagaccctgaaggatgcccactgagcagattcaaggactccctgggcaaccctacacacatcctgagaatcggcgagagctacaaagagaagcagaggacaatccaggccaagaaagaggtggaacagagaagagccggcggatactctaggaagtacgccagcaaggccaagaatctggccgacgacatggtccgaaacaccgccagagatctgctgtactacgccgtgacacaggacgccatgctgatcttcgagaatctgagcagaggcttcggccggcagggcaagagaacctttatggccgagaggcagtacaccagaatggaagattggctcacagctaaactggcctacgagggactgagcaagacctacctgtccaaaacactggcccagtatacctccaagacctgcagcaattgcggcttcaccatcaccagcgccgactacgacagagtgctggaaaagctcaagaaaaccgccaccggctggatgaccaccatcaacggcaaagagctgaaggttgagggccagatcacctactacaacaggaggaagaggcagaacgtcgtgaaggatctgagcgtggaactggacagactgagcgaagagagcgtgaacaacgacatcagcagctggacaaagggcagatcaggcgaggctctgagcctgctgaagaagaggtttagccacagacctgtgcaagagaagttcgtgtgcctgaactgcggcttcgagacacacgccgatgaacaggctgccctgaacattgccagaagctggctgttcctgagaagccaagagtacaagaagtaccagaccaacaagaccaccggcaacaccgacaagagggcctttgtggaaacctggcagagcttctacagaaaaaagctgaaagaagtctggaagcccgccgtgactagtccaaaaaagaagagaaaggta

SEQ ID NO: 246 - protein, 996 aa, synthetic construct
  REGION 1..996: note = CasX variant 486
MAPKKKRKVSRQEIKRINKIRRRLVKDSNTKKAGKTGPMKTLLVRVMTPDLRERLENLRKKPENIPQPISNTSRANLNKLLTDYTEMKKAILHVYWEEFQKDPVGLMSRVAQPAPKNIDQRKLIPVKDGNERLTSSGFACSQCCQPLYVYKLEQVNDKGKPHTNYFGRCNVSEHERLILLSPHKPEANDELVTYSLGKFGQRALDFYSIHVTKESTHPVKPLAQIAGNRYASGPVGKALSDACMGTIASFLSKYQDIIIEHQKVVKGNQKRLESLRELAGKENLEYPSVTLPPQPHTKEGVDAYNEVIARVRMWVNLNLWQKLKLSRDDAKPLLRLKGFPSFPLVERQANEVDWWDMVCNVKKLINEKKEDGKVFWQNLAGYKRQEALRPYLSSEEDRKKGKKFARYQLGDLLKHLEKKHGEDWGKVYDEAWERIDKKVEGLSKHIKLEEERRSEDAQSKAALTDWLRAKASFVIEGLKEADKDEFCRCELKLQKWYGDLRGKPFAIEAENSILDISGFSKQYNCAFIWQKDGVKKLNLYLIINYFKGGKLRFKKIKPEAFEANRFYTVINKKSGEIVPMEVNFNFDDPNLIILPLAFGKRQGREFIWNDLLSLETGSLKLANGRVIEKTLYNRRTRQDEPALFVALTFERREVLDSSNIKPMNLIGVDRGENIPAVIALTDPEGCPLSRFKDSLGNPTHILRIGESYKEKQRTIQAKKEVEQRRAGGYSRKYASKAKNLADDMVRNTARDLLYYAVTQDAMLIFENLSRGFGRQGKRTFMAERQYTRMEDWLTAKLAYEGLSKTYLSKTLAQYTSKTCSNCGFTITSADYDRVLEKLKKTATGWMTTINGKELKVEGQITYYNRRKRQNVVKDLSVELDRLSEESVNNDISSWTKGRSGEALSLLKKRFSHRPVQEKFVCLNCGFETHADEQAALNIARSWLFLRSQEYKKYQTNKTTGNTDKRAFVETWQSFYRKKLKEVWKPAVTSPKKKRKV

SEQ ID NO: 247 - DNA, 2988 bp, synthetic construct
  misc_feature 1..2988: note = CasX variant 487
  source 1..2988: mol_type = other DNA
atggccccaaagaagaagcggaaggtctctagacaagagatcaagagaatcaacaagatcagaaggagactggtcaaggacagcaacacaaagaaggccggcaagacaggccccatgaaaaccctgctcgtcagagtgatgacccctgacctgagagagcggctggaaaacctgagaaagaagcccgagaacatccctcagcctatcagcaacaccagcagggccaacctgaacaagctgctgaccgactacaccgagatgaagaaagccatcctgcacgtgtactgggaagagttccagaaagaccccgtgggcctgatgagcagagttgctcagcccgctcctaagaacatcgaccagagaaagctgatccccgtgaaggacggcaacgagagactgacctctagcggctttgcctgcagccagtgttgccagcctctgtacgtgtacaagctggaacaagtgaacgacaagggcaagccccacaccaactacttcggcagatgcaacgtgtccgagcacgagaggctgatcctgctgtctcctcacaagcccgaggccaacgatgagctggtcacatacagcctgggcaagttcggacagagagccctggacttctacagcatccacgtgaccaaagaaagcacacaccccgtgaagcccctggctcagatcgccggcaatagatacgcctctggacctgtgggcaaagccctgtccgatgcctgcatgggaacaatcgccagcttcctgagcaagtaccaggacatcatcatcgagcaccagaaggtggtcaagggcaaccagaagagactggaaagcctgagggagctggccggcaaagagaacctggaataccccagcgtgaccctgcctcctcagcctcacacaaaagaaggcgtggacgcctacaacgaagtgatcgccagagtgagaatgtgggtcaacctgaacctgtggcagaagctgaaactgtccagggacgacgccaagcctctgctgagactgaagggcttccctagcttccctctggtggaaagacaggccaatgaagtggattggtgggacatggtctgcaacgtgaagaagctgatcaacgagaagaaagaggatggcaaggttttctggcagaacctggccggctacaagagacaagaagccctgaggccttacctgagcagcgaagaggaccggaagaagggcaagaagttcgccagataccagctgggcgacctgctgctgcacctggaaaagaagcacggcgaggactggggcaaagtgtacgatgaggcctgggagagaatcgacaagaaggtggaaggcctgagcaagcacattaagctggaagaggaaagaaggagcgaggacgcccaatctaaagccgctctgaccgattggctgagagccaaggccagctttgtgatcgagggcctgaaagaggccgacaaggacgagttctgcagatgcgagctgaagctgcagaagtggtacggcgatctgagaggcaagcccttcgccattgaggccgagaacagcatcctggacatcagcggcttcagcaagcagtacaactgcgccttcatttggcagaaagacggcgtcaagaaactgaacctgtacctgatcatcaattacttcaaaggcggcaagctgcggttcaagaagatcaaacccgaggccttcgaggctaacagattctacaccgtgatcaacaaaaagtccggcgagatcgtgcccatggaagtgaacttcaacttcgacgaccccaacctgattatcctgcctctggccttcggcaagagacagggcagagagttcatctggaacgatctgctgagcctggaaaccggctctctgaagctggccaatggcagagtgatcgagaaaaccctgtacaacaggagaaccagacaggacgagcctgctctgtttgtggccctgaccttcgagagaagagaggtgctggacagcagcaacatcaagcccatgaacctgatcggcgtggaccggggcgagaatatccctgctgtgatcgccctgacagaccctgaaggatgcccactgagcagattcaaggactccctgggcaaccctacacacatcctgagaatcggcgagagctacaaagagaagcagaggacaatccaggccaagaaagaggtggaacagagaagagccggcggatactctaggaagtacgccagcaaggccaagaatctggccgacgacatggtccgaaacaccgccagagatctgctgtactacgccgtgacacaggacgccatgctgatcttcgagaatctgagcagaggcttcggccggcagggcaagagaacctttatggccgagaggcagtacaccagaatggaagattggctcacagctaaactggcctacgagggactgagcaagacctacctgtccaaaacactggcccagtatacctccaagacctgcagcaattgcggcttcaccatcaccagcgccgactacgacagagtgctggaaaagctcaagaaaaccgccaccggctggatgaccaccatcaacggcaaagagctgaaggttgagggccagatcacctactacaacaggtacaagaggcagaacgtcgtgaaggatctgagcgtggaactggacagactgagcgaagagagcgtgaacaacgacatcagcagctggacaaagggcagatcaggcgaggctctgagcctgctgaagaagaggtttagccacagacctgtgcaagagaagttcgtgtgcctgaactgcggcttcgagacacacgccgatgaacaggctgccctgaacattgccagaagctggctgttcctgagaagccaagagtacaagaagtaccagaccaacaagaccaccggcaacaccgacaagagggcctttgtggaaacctggcagagcttctacagaaaaaagctgaaagaagtctggaagcccgccgtgactagtccaaaaaagaagagaaaggta

SEQ ID NO: 248 - protein, 996 aa, synthetic construct
  REGION 1..996: note = CasX variant 487
MAPKKKRKVSRQEIKRINKIRRRLVKDSNTKKAGKTGPMKTLLVRVMTPDLRERLENLRKKPENIPQPISNTSRANLNKLLTDYTEMKKAILHVYWEEFQKDPVGLMSRVAQPAPKNIDQRKLIPVKDGNERLTSSGFACSQCCQPLYVYKLEQVNDKGKPHTNYFGRCNVSEHERLILLSPHKPEANDELVTYSLGKFGQRALDFYSIHVTKESTHPVKPLAQIAGNRYASGPVGKALSDACMGTIASFLSKYQDIIIEHQKVVKGNQKRLESLRELAGKENLEYPSVTLPPQPHTKEGVDAYNEVIARVRMWVNLNLWQKLKLSRDDAKPLLRLKGFPSFPLVERQANEVDWWDMVCNVKKLINEKKEDGKVFWQNLAGYKRQEALRPYLSSEEDRKKGKKFARYQLGDLLLHLEKKHGEDWGKVYDEAWERIDKKVEGLSKHIKLEEERRSEDAQSKAALTDWLRAKASFVIEGLKEADKDEFCRCELKLQKWYGDLRGKPFAIEAENSILDISGFSKQYNCAFIWQKDGVKKLNLYLIINYFKGGKLRFKKIKPEAFEANRFYTVINKKSGEIVPMEVNFNFDDPNLIILPLAFGKRQGREFIWNDLLSLETGSLKLANGRVIEKTLYNRRTRQDEPALFVALTFERREVLDSSNIKPMNLIGVDRGENIPAVIALTDPEGCPLSRFKDSLGNPTHILRIGESYKEKQRTIQAKKEVEQRRAGGYSRKYASKAKNLADDMVRNTARDLLYYAVTQDAMLIFENLSRGFGRQGKRTFMAERQYTRMEDWLTAKLAYEGLSKTYLSKTLAQYTSKTCSNCGFTITSADYDRVLEKLKKTATGWMTTINGKELKVEGQITYYNRYKRQNVVKDLSVELDRLSEESVNNDISSWTKGRSGEALSLLKKRFSHRPVQEKFVCLNCGFETHADEQAALNIARSWLFLRSQEYKKYQTNKTTGNTDKRAFVETWQSFYRKKLKEVWKPAVTSPKKKRKV

SEQ ID NO: 249 - DNA, 2991 bp, synthetic construct
  misc_feature 1..2991: note = CasX variant 488
  source 1..2991: mol_type = other DNA
atggccccaaagaagaagcggaaggtctctagacaagagatcaagagaatcaacaagatcagaaggagactggtcaaggacagcaacacaaagaaggccggcaagacaggccccatgaaaaccctgctcgtcagagtgatgacccctgacctgagagagcggctggaaaacctgagaaagaagcccgagaacatccctcagcctatcagcaacaccagcagggccaacctgaacaagctgctgaccgactacaccgagatgaagaaagccatcctgcacgtgtactgggaagagttccagaaagaccccgtgggcctgatgagcagagttgctcagcctgccagcaagaagatcgaccagaacaagctgaagcccgagatggacgagaagggcaatctgaccacagccggctttgcctgctctcagtgtggccagcctctgttcgtgtacaagctggaacaggtgtccgagaaaggcaaggcctacaccaactacttcggcagatgtaacgtggccgagcacgagaagctgattctgctggcccagctgaaacctgagaaggactctgatgaggccgtgacctacagcctgggcaagtttggacagagagccctggacttctacagcatccacgtgaccaaagaaagcacacaccccgtgaagcccctggctcagatcgccggcaatagatacgcctctggacctgtgggcaaagccctgtccgatgcctgcatgggaacaatcgccagcttcctgagcaagtaccaggacatcatcatcgagcaccagaaggtggtcaagggcaaccagaagagactggaaagcctgagggagctggccggcaaagagaacctggaataccccagcgtgaccctgcctcctcagcctcacacaaaagaaggcgtggacgcctacaacgaagtgatcgccagagtgagaatgtgggtcaacctgaacctgtggcagaagctgaaactgtccagggacgacgccaagcctctgctgagactgaagggcttccctagcttccctctggtggaaagacaggccaatgaagtggattggtgggacatggtctgcaacgtgaagaagctgatcaacgagaagaaagaggatggcaaggttttctggcagaacctggccggctacaagagacaagaagccctgaggccttacctgagcagcgaagaggaccggaagaagggcaagaagttcgccagataccagttcggcgacctgctgctgcacctggaaaagaagcacggcgaggactggggcaaagtgtacgatgaggcctgggagagaatcgacaagaaggtggaaggcctgagcaagcacattaagctggaagaggaaagaaggagcgaggacgcccaatctaaagccgctctgaccgattggctgagagccaaggccagctttgtgatcgagggcctgaaagaggccgacaaggacgagttctgcagatgcgagctgaagctgcagaagtggtacggcgatctgagaggcaagcccttcgccattgaggccgagaacagcatcctggacatcagcggcttcagcaagcagtacaactgcgccttcatttggcagaaagacggcgtcaagaaactgaacctgtacctgatcatcaattacttcaaaggcggcaagctgcggttcaagaagatcaaacccgaggccttcgaggctaacagattctacaccgtgatcaacaaaaagtccggcgagatcgtgcccatggaagtgaacttcaacttcgacgaccccaacctgattatcctgcctctggccttcggcaagagacagggcagagagttcatctggaacgatctgctgagcctggaaaccggctctctgaagctggccaatggcagagtgatcgagaaaaccctgtacaacaggagaaccagacaggacgagcctgctctgtttgtggccctgaccttcgagagaagagaggtgctggacagcagcaacatcaagcccatgaacctgatcggcatcgaccggggcgagaatatccctgctgtgatcgccctgacagaccctgaaggatgcccactgagcagattcaaggactccctgggcaaccctacacacatcctgagaatcggcgagagctacaaagagaagcagaggacaatccaggccaagaaagaggtggaacagagaagagccggcggatactctaggaagtacgccagcaaggccaagaatctggccgacgacatggtccgaaacaccgccagagatctgctgtactacgccgtgacacaggacgccatgctgatcttcgagaatctgagcagaggcttcggccggcagggcaagagaacctttatggccgagaggcagtacaccagaatggaagattggctcacagctaaactggcctacgagggactgagcaagacctacctgtccaaaacactggcccagtatacctccaagacctgcagcaattgcggcttcaccatcaccagcgccgactacgacagagtgctggaaaagctcaagaaaaccgccaccggctggatgaccaccatcaacggcaaagagctgaaggttgagggccagatcacctactacaacaggtacaagaggcagaacgtcgtgaaggatctgagcgtggaactggacagactgagcgaagagagcgtgaacaacgacatcagcagctggacaaagggcagatcaggcgaggctctgagcctgctgaagaagaggtttagccacagacctgtgcaagagaagttcgtgtgcctgaactgcggcttcgagacacacgccgatgaacaggctgccctgaacattgccagaagctggctgttcctgagaagccaagagtacaagaagtaccagaccaacaagaccaccggcaacaccgacaagagggcctttgtggaaacctggcagagcttctacagaaaaaagctgaaagaagtctggaagcccgccgtgactagtccaaaaaagaagagaaaggta

SEQ ID NO: 250 - protein, 997 aa, synthetic construct
  REGION 1..997: note = CasX variant 488
MAPKKKRKVSRQEIKRINKIRRRLVKDSNTKKAGKTGPMKTLLVRVMTPDLRERLENLRKKPENIPQPISNTSRANLNKLLTDYTEMKKAILHVYWEEFQKDPVGLMSRVAQPASKKIDQNKLKPEMDEKGNLTTAGFACSQCGQPLFVYKLEQVSEKGKAYTNYFGRCNVAEHEKLILLAQLKPEKDSDEAVTYSLGKFGQRALDFYSIHVTKESTHPVKPLAQIAGNRYASGPVGKALSDACMGTIASFLSKYQDIIIEHQKVVKGNQKRLESLRELAGKENLEYPSVTLPPQPHTKEGVDAYNEVIARVRMWVNLNLWQKLKLSRDDAKPLLRLKGFPSFPLVERQANEVDWWDMVCNVKKLINEKKEDGKVFWQNLAGYKRQEALRPYLSSEEDRKKGKKFARYQFGDLLLHLEKKHGEDWGKVYDEAWERIDKKVEGLSKHIKLEEERRSEDAQSKAALTDWLRAKASFVIEGLKEADKDEFCRCELKLQKWYGDLRGKPFAIEAENSILDISGFSKQYNCAFIWQKDGVKKLNLYLIINYFKGGKLRFKKIKPEAFEANRFYTVINKKSGEIVPMEVNFNFDDPNLIILPLAFGKRQGREFIWNDLLSLETGSLKLANGRVIEKTLYNRRTRQDEPALFVALTFERREVLDSSNIKPMNLIGIDRGENIPAVIALTDPEGCPLSRFKDSLGNPTHILRIGESYKEKQRTIQAKKEVEQRRAGGYSRKYASKAKNLADDMVRNTARDLLYYAVTQDAMLIFENLSRGFGRQGKRTFMAERQYTRMEDWLTAKLAYEGLSKTYLSKTLAQYTSKTCSNCGFTITSADYDRVLEKLKKTATGWMTTINGKELKVEGQITYYNRYKRQNVVKDLSVELDRLSEESVNNDISSWTKGRSGEALSLLKKRFSHRPVQEKFVCLNCGFETHADEQAALNIARSWLFLRSQEYKKYQTNKTTGNTDKRAFVETWQSFYRKKLKEVWKPAVTSPKKKRKV

SEQ ID NO: 251 - DNA, 2991 bp, synthetic construct
  misc_feature 1..2991: note = CasX variant 489
  source 1..2991: mol_type = other DNA
atggccccaaagaagaagcggaaggtctctagacaagagatcaagagaatcaacaagatcagaaggagactggtcaaggacagcaacacaaagaaggccggcaagacaggccccatgaaaaccctgctcgtcagagtgatgacccctgacctgagagagcggctggaaaacctgagaaagaagcccgagaacatccctcagcctatcagcaacaccagcagggccaacctgaacaagctgctgaccgactacaccgagatgaagaaagccatcctgcacgtgtactgggaagagttccagaaagaccccgtgggcctgatgagcagagttgctcagcctgccagcaagaagatcgaccagaacaagctgaagcccgagatggacgagaagggcaatctgaccacagccggctttgcctgctctcagtgtggccagcctctgttcgtgtacaagctggaacaggtgtccgagaaaggcaaggcctacaccaactacttcggcagatgtaacgtggccgagcacgagaagctgattctgctggcccagctgaaacctgagaaggactctgatgaggccgtgacctacagcctgggcaagtttggacagagagccctggacttctacagcatccacgtgaccaaagaaagcacacaccccgtgaagcccctggctcagatcgccggcaatagatacgcctctggacctgtgggcaaagccctgtccgatgcctgcatgggaacaatcgccagcttcctgagcaagtaccaggacatcatcatcgagcaccagaaggtggtcaagggcaaccagaagagactggaaagcctgagggagctggccggcaaagagaacctggaataccccagcgtgaccctgcctcctcagcctcacacaaaagaaggcgtggacgcctacaacgaagtgatcgccagagtgagaatgtgggtcaacctgaacctgtggcagaagctgaaactgtccagggacgacgccaagcctctgctgagactgaagggcttccctagcttccctctggtggaaagacaggccaatgaagtggattggtgggacatggtctgcaacgtgaagaagctgatcaacgagaagaaagaggatggcaaggttttctggcagaacctggccggctacaagagacaagaagccctgaggccttacctgagcagcgaagaggaccggaagaagggcaagaagttcgccagataccagctgggcgacctgctgctgcacctggaaaagaagcacggcgaggactggggcaaagtgtacgatgaggcctgggagagaatcgacaagaaggtggaaggcctgagcaagcacattaagctggaagaggaaagaaggagcgaggacgcccaatctaaagccgctctgaccgattggctgagagccaaggccagctttgtgatcgagggcctgaaagaggccgacaaggacgagttctgcagatgcgagctgaagctgcagaagtggtacggcgatctgagaggcaagcccttcgccattgaggccgagaacagcatcctggacatcagcggcttcagcaagcagtacaactgcgccttcatttggcagaaagacggcgtcaagaaactgaacctgtacctgatcatcaattacttcaaaggcggcaagctgcggttcaagaagatcaaacccgaggccttcgaggctaacagattctacaccgtgatcaacaaaaagtccggcgagatcgtgcccatggaagtgaacttcaacttcgacgaccccaacctgattatcctgcctctggccttcggcaagagacagggcagagagttcatctggaacgatctgctgagcctggaaaccggctctctgaagctggccaatggcagagtgatcgagaaaaccctgtacaacaggagaaccagacaggacgagcctgctctgtttgtggccctgaccttcgagagaagagaggtgctggacagcagcaacatcaagcccatgaacctgatcggcgtggaccggggcgagaatatccctgctgtgatcgccctgacagaccctgaaggatgcccactgagcagattcaaggactccctgggcaaccctacacacatcctgagaatcggcgagagctacaaagagaagcagaggacaatccaggccaagaaagaggtggaacagagaagagccggcggatactctaggaagtacgccagcaaggccaagaatctggccgacgacatggtccgaaacaccgccagagatctgctgtactacgccgtgacacaggacgccatgctgatcttcgagaatctgagcagaggcttcggccggcagggcaagagaacctttatggccgagaggcagtacaccagaatggaagattggctcacagctaaactggcctacgagggactgagcaagacctacctgtccaaaacactggcccagtatacctccaagacctgcagcaattgcggcttcaccatcaccagcgccgactacgacagagtgctggaaaagctcaagaaaaccgccaccggctggatgaccaccatcaacggcaaagagctgaaggttgagggccagatcacctactacaacaggaggaagaggcagaacgtcgtgaaggatctgagcgtggaactggacagactgagcgaagagagcgtgaacaacgacatcagcagctggacaaagggcagatcaggcgaggctctgagcctgctgaagaagaggtttagccacagacctgtgcaagagaagttcgtgtgcctgaactgcggcttcgagacacacgccgatgaacaggctgccctgaacattgccagaagctggctgttcctgagaagccaagagtacaagaagtaccagaccaacaagaccaccggcaacaccgacaagagggcctttgtggaaacctggcagagcttctacagaaaaaagctgaaagaagtctggaagcccgccgtgactagtccaaaaaagaagagaaaggta

SEQ ID NO: 252 - protein, 997 aa, synthetic construct
  REGION 1..997: note = CasX variant 489
MAPKKKRKVSRQEIKRINKIRRRLVKDSNTKKAGKTGPMKTLLVRVMTPDLRERLENLRKKPENIPQPISNTSRANLNKLLTDYTEMKKAILHVYWEEFQKDPVGLMSRVAQPASKKIDQNKLKPEMDEKGNLTTAGFACSQCGQPLFVYKLEQVSEKGKAYTNYFGRCNVAEHEKLILLAQLKPEKDSDEAVTYSLGKFGQRALDFYSIHVTKESTHPVKPLAQIAGNRYASGPVGKALSDACMGTIASFLSKYQDIIIEHQKVVKGNQKRLESLRELAGKENLEYPSVTLPPQPHTKEGVDAYNEVIARVRMWVNLNLWQKLKLSRDDAKPLLRLKGFPSFPLVERQANEVDWWDMVCNVKKLINEKKEDGKVFWQNLAGYKRQEALRPYLSSEEDRKKGKKFARYQLGDLLLHLEKKHGEDWGKVYDEAWERIDKKVEGLSKHIKLEEERRSEDAQSKAALTDWLRAKASFVIEGLKEADKDEFCRCELKLQKWYGDLRGKPFAIEAENSILDISGFSKQYNCAFIWQKDGVKKLNLYLIINYFKGGKLRFKKIKPEAFEANRFYTVINKKSGEIVPMEVNFNFDDPNLIILPLAFGKRQGREFIWNDLLSLETGSLKLANGRVIEKTLYNRRTRQDEPALFVALTFERREVLDSSNIKPMNLIGVDRGENIPAVIALTDPEGCPLSRFKDSLGNPTHILRIGESYKEKQRTIQAKKEVEQRRAGGYSRKYASKAKNLADDMVRNTARDLLYYAVTQDAMLIFENLSRGFGRQGKRTFMAERQYTRMEDWLTAKLAYEGLSKTYLSKTLAQYTSKTCSNCGFTITSADYDRVLEKLKKTATGWMTTINGKELKVEGQITYYNRRKRQNVVKDLSVELDRLSEESVNNDISSWTKGRSGEALSLLKKRFSHRPVQEKFVCLNCGFETHADEQAALNIARSWLFLRSQEYKKYQTNKTTGNTDKRAFVETWQSFYRKKLKEVWKPAVTSPKKKRKV

SEQ ID NO: 253 - DNA, 2991 bp, synthetic construct
  misc_feature 1..2991: note = CasX variant 490
  source 1..2991: mol_type = other DNA
atggccccaaagaagaagcggaaggtctctagacaagagatcaagagaatcaacaagatcagaaggagactggtcaaggacagcaacacaaagaaggccggcaagacaggccccatgaaaaccctgctcgtcagagtgatgacccctgacctgagagagcggctggaaaacctgagaaagaagcccgagaacatccctcagcctatcagcaacaccagcagggccaacctgaacaagctgctgaccgactacaccgagatgaagaaagccatcctgcacgtgtactgggaagagttccagaaagaccccgtgggcctgatgagcagagttgctcagcctgccagcaagaagatcgaccagaacaagctgaagcccgagatggacgagaagggcaatctgaccacagccggctttgcctgctctcagtgtggccagcctctgttcgtgtacaagctggaacaggtgtccgagaaaggcaaggcctacaccaactacttcggcagatgtaacgtggccgagcacgagaagctgattctgctggcccagctgaaacctgagaaggactctgatgaggccgtgacctacagcctgggcaagtttggacagagagccctggacttctacagcatccacgtgaccaaagaaagcacacaccccgtgaagcccctggctcagatcgccggcaatagatacgcctctggacctgtgggcaaagccctgtccgatgcctgcatgggaacaatcgccagcttcctgagcaagtaccaggacatcatcatcgagcaccagaaggtggtcaagggcaaccagaagagactggaaagcctgagggagctggccggcaaagagaacctggaataccccagcgtgaccctgcctcctcagcctcacacaaaagaaggcgtggacgcctacaacgaagtgatcgccagagtgagaatgtgggtcaacctgaacctgtggcagaagctgaaactgtccagggacgacgccaagcctctgctgagactgaagggcttccctagcttccctctggtggaaagacaggccaatgaagtggattggtgggacatggtctgcaacgtgaagaagctgatcaacgagaagaaagaggatggcaaggttttctggcagaacctggccggctacaagagacaagaagccctgaggccttacctgagcagcgaagaggaccggaagaagggcaagaagttcgccagataccagctgggcgacctgctgaagcacctggaaaagaagcacggcgaggactggggcaaagtgtacgatgaggcctgggagagaatcgacaagaaggtggaaggcctgagcaagcacattaagctggaagaggaaagaaggagcgaggacgcccaatctaaagccgctctgaccgattggctgagagccaaggccagctttgtgatcgagggcctgaaagaggccgacaaggacgagttctgcagatgcgagctgaagctgcagaagtggtacggcgatctgagaggcaagcccttcgccattgaggccgagaacagcatcctggacatcagcggcttcagcaagcagtacaactgcgccttcatttggcagaaagacggcgtcaagaaactgaacctgtacctgatcatcaattacttcaaaggcggcaagctgcggttcaagaagatcaaacccgaggccttcgaggctaacagattctacaccgtgatcaacaaaaagtccggcgagatcgtgcccatggaagtgaacttcaacttcgacgaccccaacctgattatcctgcctctggccttcggcaagagacagggcagagagttcatctggaacgatctgctgagcctggaaaccggctctctgaagctggccaatggcagagtgatcgagaaaaccctgtacaacaggagaaccagacaggacgagcctgctctgtttgtggccctgaccttcgagagaagagaggtgctggacagcagcaacatcaagcccatgaacctgatcggcgtggaccggggcgagaatatccctgctgtgatcgccctgacagaccctgaaggatgcccactgagcagattcaaggactccctgggcaaccctacacacatcctgagaatcggcgagagctacaaagagaagcagaggacaatccaggccaagaaagaggtggaacagagaagagccggcggatactctaggaagtacgccagcaaggccaagaatctggccgacgacatggtccgaaacaccgccagagatctgctgtactacgccgtgacacaggacgccatgctgatcttcgagaatctgagcagaggcttcggccggcagggcaagagaacctttatggccgagaggcagtacaccagaatggaagattggctcacagctaaactggcctacgagggactgagcaagacctacctgtccaaaacactggcccagtatacctccaagacctgcagcaattgcggcttcaccatcaccagcgccgactacgacagagtgctggaaaagctcaagaaaaccgccaccggctggatgaccaccatcaacggcaaagagctgaaggttgagggccagatcacctactacaacaggaggaagaggcagaacgtcgtgaaggatctgagcgtggaactggacagactgagcgaagagagcgtgaacaacgacatcagcagctggacaaagggcagatcaggcgaggctctgagcctgctgaagaagaggtttagccacagacctgtgcaagagaagttcgtgtgcctgaactgcggcttcgagacacacgccgatgaacaggctgccctgaacattgccagaagctggctgttcctgagaagccaagagtacaagaagtaccagaccaacaagaccaccggcaacaccgacaagagggcctttgtggaaacctggcagagcttctacagaaaaaagctgaaagaagtctggaagcccgccgtgactagtccaaaaaagaagagaaaggta

SEQ ID NO: 254 - protein, 997 aa, synthetic construct
  REGION 1..997: note = CasX variant 490
MAPKKKRKVSRQEIKRINKIRRRLVKDSNTKKAGKTGPMKTLLVRVMTPDLRERLENLRKKPENIPQPISNTSRANLNKLLTDYTEMKKAILHVYWEEFQKDPVGLMSRVAQPASKKIDQNKLKPEMDEKGNLTTAGFACSQCGQPLFVYKLEQVSEKGKAYTNYFGRCNVAEHEKLILLAQLKPEKDSDEAVTYSLGKFGQRALDFYSIHVTKESTHPVKPLAQIAGNRYASGPVGKALSDACMGTIASFLSKYQDIIIEHQKVVKGNQKRLESLRELAGKENLEYPSVTLPPQPHTKEGVDAYNEVIARVRMWVNLNLWQKLKLSRDDAKPLLRLKGFPSFPLVERQANEVDWWDMVCNVKKLINEKKEDGKVFWQNLAGYKRQEALRPYLSSEEDRKKGKKFARYQLGDLLKHLEKKHGEDWGKVYDEAWERIDKKVEGLSKHIKLEEERRSEDAQSKAALTDWLRAKASFVIEGLKEADKDEFCRCELKLQKWYGDLRGKPFAIEAENSILDISGFSKQYNCAFIWQKDGVKKLNLYLIINYFKGGKLRFKKIKPEAFEANRFYTVINKKSGEIVPMEVNFNFDDPNLIILPLAFGKRQGREFIWNDLLSLETGSLKLANGRVIEKTLYNRRTRQDEPALFVALTFERREVLDSSNIKPMNLIGVDRGENIPAVIALTDPEGCPLSRFKDSLGNPTHILRIGESYKEKQRTIQAKKEVEQRRAGGYSRKYASKAKNLADDMVRNTARDLLYYAVTQDAMLIFENLSRGFGRQGKRTFMAERQYTRMEDWLTAKLAYEGLSKTYLSKTLAQYTSKTCSNCGFTITSADYDRVLEKLKKTATGWMTTINGKELKVEGQITYYNRRKRQNVVKDLSVELDRLSEESVNNDISSWTKGRSGEALSLLKKRFSHRPVQEKFVCLNCGFETHADEQAALNIARSWLFLRSQEYKKYQTNKTTGNTDKRAFVETWQSFYRKKLKEVWKPAVTSPKKKRKV

SEQ ID NO: 255 - DNA, 2991 bp, synthetic construct
  misc_feature 1..2991: note = CasX variant 491
  source 1..2991: mol_type = other DNA
atggccccaaagaagaagcggaaggtctctagacaagagatcaagagaatcaacaagatcagaaggagactggtcaaggacagcaacacaaagaaggccggcaagacaggccccatgaaaaccctgctcgtcagagtgatgacccctgacctgagagagcggctggaaaacctgagaaagaagcccgagaacatccctcagcctatcagcaacaccagcagggccaacctgaacaagctgctgaccgactacaccgagatgaagaaagccatcctgcacgtgtactgggaagagttccagaaagaccccgtgggcctgatgagcagagttgctcagcctgccagcaagaagatcgaccagaacaagctgaagcccgagatggacgagaagggcaatctgaccacagccggctttgcctgctctcagtgtggccagcctctgttcgtgtacaagctggaacaggtgtccgagaaaggcaaggcctacaccaactacttcggcagatgtaacgtggccgagcacgagaagctgattctgctggcccagctgaaacctgagaaggactctgatgaggccgtgacctacagcctgggcaagtttggacagagagccctggacttctacagcatccacgtgaccaaagaaagcacacaccccgtgaagcccctggctcagatcgccggcaatagatacgcctctggacctgtgggcaaagccctgtccgatgcctgcatgggaacaatcgccagcttcctgagcaagtaccaggacatcatcatcgagcaccagaaggtggtcaagggcaaccagaagagactggaaagcctgagggagctggccggcaaagagaacctggaataccccagcgtgaccctgcctcctcagcctcacacaaaagaaggcgtggacgcctacaacgaagtgatcgccagagtgagaatgtgggtcaacctgaacctgtggcagaagctgaaactgtccagggacgacgccaagcctctgctgagactgaagggcttccctagcttccctctggtggaaagacaggccaatgaagtggattggtgggacatggtctgcaacgtgaagaagctgatcaacgagaagaaagaggatggcaaggttttctggcagaacctggccggctacaagagacaagaagccctgaggccttacctgagcagcgaagaggaccggaagaagggcaagaagttcgccagataccagctgggcgacctgctgctgcacctggaaaagaagcacggcgaggactggggcaaagtgtacgatgaggcctgggagagaatcgacaagaaggtggaaggcctgagcaagcacattaagctggaagaggaaagaaggagcgaggacgcccaatctaaagccgctctgaccgattggctgagagccaaggccagctttgtgatcgagggcctgaaagaggccgacaaggacgagttctgcagatgcgagctgaagctgcagaagtggtacggcgatctgagaggcaagcccttcgccattgaggccgagaacagcatcctggacatcagcggcttcagcaagcagtacaactgcgccttcatttggcagaaagacggcgtcaagaaactgaacctgtacctgatcatcaattacttcaaaggcggcaagctgcggttcaagaagatcaaacccgaggccttcgaggctaacagattctacaccgtgatcaacaaaaagtccggcgagatcgtgcccatggaagtgaacttcaacttcgacgaccccaacctgattatcctgcctctggccttcggcaagagacagggcagagagttcatctggaacgatctgctgagcctggaaaccggctctctgaagctggccaatggcagagtgatcgagaaaaccctgtacaacaggagaaccagacaggacgagcctgctctgtttgtggccctgaccttcgagagaagagaggtgctggacagcagcaacatcaagcccatgaacctgatcggcgtggaccggggcgagaatatccctgctgtgatcgccctgacagaccctgaaggatgcccactgagcagattcaaggactccctgggcaaccctacacacatcctgagaatcggcgagagctacaaagagaagcagaggacaatccaggccaagaaagaggtggaacagagaagagccggcggatactctaggaagtacgccagcaaggccaagaatctggccgacgacatggtccgaaacaccgccagagatctgctgtactacgccgtgacacaggacgccatgctgatcttcgagaatctgagcagaggcttcggccggcagggcaagagaacctttatggccgagaggcagtacaccagaatggaagattggctcacagctaaactggcctacgagggactgagcaagacctacctgtccaaaacactggcccagtatacctccaagacctgcagcaattgcggcttcaccatcaccagcgccgactacgacagagtgctggaaaagctcaagaaaaccgccaccggctggatgaccaccatcaacggcaaagagctgaaggttgagggccagatcacctactacaacaggtacaagaggcagaacgtcgtgaaggatctgagcgtggaactggacagactgagcgaagagagcgtgaacaacgacatcagcagctggacaaagggcagatcaggcgaggctctgagcctgctgaagaagaggtttagccacagacctgtgcaagagaagttcgtgtgcctgaactgcggcttcgagacacacgccgatgaacaggctgccctgaacattgccagaagctggctgttcctgagaagccaagagtacaagaagtaccagaccaacaagaccaccggcaacaccgacaagagggcctttgtggaaacctggcagagcttctacagaaaaaagctgaaagaagtctggaagcccgccgtgactagtccaaaaaagaagagaaaggta

SEQ ID NO: 256 - protein, 997 aa, synthetic construct
  REGION 1..997: note = CasX variant 491
MAPKKKRKVSRQEIKRINKIRRRLVKDSNTKKAGKTGPMKTLLVRVMTPDLRERLENLRKKPENIPQPISNTSRANLNKLLTDYTEMKKAILHVYWEEFQKDPVGLMSRVAQPASKKIDQNKLKPEMDEKGNLTTAGFACSQCGQPLFVYKLEQVSEKGKAYTNYFGRCNVAEHEKLILLAQLKPEKDSDEAVTYSLGKFGQRALDFYSIHVTKESTHPVKPLAQIAGNRYASGPVGKALSDACMGTIASFLSKYQDIIIEHQKVVKGNQKRLESLRELAGKENLEYPSVTLPPQPHTKEGVDAYNEVIARVRMWVNLNLWQKLKLSRDDAKPLLRLKGFPSFPLVERQANEVDWWDMVCNVKKLINEKKEDGKVFWQNLAGYKRQEALRPYLSSEEDRKKGKKFARYQLGDLLLHLEKKHGEDWGKVYDEAWERIDKKVEGLSKHIKLEEERRSEDAQSKAALTDWLRAKASFVIEGLKEADKDEFCRCELKLQKWYGDLRGKPFAIEAENSILDISGFSKQYNCAFIWQKDGVKKLNLYLIINYFKGGKLRFKKIKPEAFEANRFYTVINKKSGEIVPMEVNFNFDDPNLIILPLAFGKRQGREFIWNDLLSLETGSLKLANGRVIEKTLYNRRTRQDEPALFVALTFERREVLDSSNIKPMNLIGVDRGENIPAVIALTDPEGCPLSRFKDSLGNPTHILRIGESYKEKQRTIQAKKEVEQRRAGGYSRKYASKAKNLADDMVRNTARDLLYYAVTQDAMLIFENLSRGFGRQGKRTFMAERQYTRMEDWLTAKLAYEGLSKTYLSKTLAQYTSKTCSNCGFTITSADYDRVLEKLKKTATGWMTTINGKELKVEGQITYYNRYKRQNVVKDLSVELDRLSEESVNNDISSWTKGRSGEALSLLKKRFSHRPVQEKFVCLNCGFETHADEQAALNIARSWLFLRSQEYKKYQTNKTTGNTDKRAFVETWQSFYRKKLKEVWKPAVTSPKKKRKV

SEQ ID NO: 257 - DNA, 2991 bp, synthetic construct
  misc_feature 1..2991: note = CasX variant 494
  source 1..2991: mol_type = other DNA
atggccccaaagaagaagcggaaggtctctagacaagagatcaagagaatcaacaagatcagaaggagactggtcaaggacagcaacacaaagaaggccggcaagacaggccccatgaaaaccctgctcgtcagagtgatgacccctgacctgagagagcggctggaaaacctgagaaagaagcccgagaacatccctcagcctatcagcaacaccagcagggccaacctgaacaagctgctgaccgactacaccgagatgaagaaagccatcctgcacgtgtactgggaagagttccagaaagaccccgtgggcctgatgagcagagttgctcagcctgccagcaagaagatcgaccagaacaagctgaagcccgagatggacgagaagggcaatctgaccacagccggctttgcctgctctcagtgtggccagcctctgttcgtgtacaagctggaacaggtgtccgagaaaggcaaggcctacaccaactacttcggcagatgtaacgtggccgagcacgagaagctgattctgctggcccagctgaaacctgagaaggactctgatgaggccgtgacctacagcctgggcaagtttggacagagagccctggacttctacagcatccacgtgaccagggagagcaatcaccctgtgaagcccctggaacagatcggcggcaatagctgtgcctctggacctgtgggaaaagccctgagcgacgcctgtatgggagccgtggcatccttcctgaccaagtaccaggacatcatcctggaacaccagaaagtgatcaagaagaacgagaaaagactggccaacctcaaggatatcgccagcgctaacggcctggcctttcctaagatcaccctgcctccacagcctcacaccaaagagggcatcgaggcctacaacaacgtggtggcccagatcgtgatttgggtcaacctgaatctgtggcagaagctgaagatcggcagggacgaagccaagccactgcagagactgaagggcttccctagcttccctctggtggaaagacaggccaatgaagtggattggtgggacatggtctgcaacgtgaagaagctgatcaacgagaagaaagaggatggcaaggttttctggcagaacctggccggctacaagagacaagaagccctgaggccttacctgagcagcgaagaggaccggaagaagggcaagaagttcgccagataccagctgggcgacctgctgctgcacctggaaaagaagcacggcgaggactggggcaaagtgtacgatgaggcctgggagagaatcgacaagaaggtggaaggcctgagcaagcacattaagctggaagaggaaagaaggagcgaggacgcccaatctaaagccgctctgaccgattggctgagagccaaggccagctttgtgatcgagggcctgaaagaggccgacaaggacgagttctgcagatgcgagctgaagctgcagaagtggtacggcgatctgagaggcaagcccttcgccattgaggccgagaacagcatcctggacatcagcggcttcagcaagcagtacaactgcgccttcatttggcagaaagacggcgtcaagaaactgaacctgtacctgatcatcaattacttcaaaggcggcaagctgcggttcaagaagatcaaacccgaggccttcgaggctaacagattctacaccgtgatcaacaaaaagtccggcgagatcgtgcccatggaagtgaacttcaacttcgacgaccccaacctgattatcctgcctctggccttcggcaagagacagggcagagagttcatctggaacgatctgctgagcctggaaaccggctctctgaagctggccaatggcagagtgatcgagaaaaccctgtacaacaggagaaccagacaggacgagcctgctctgtttgtggccctgaccttcgagagaagagaggtgctggacagcagcaacatcaagcccatgaacctgatcggcgtggaccggggcgagaatatccctgctgtgatcgccctgacagaccctgaaggatgcccactgagcagattcaaggactccctgggcaaccctacacacatcctgagaatcggcgagagctacaaagagaagcagaggacaatccaggccaagaaagaggtggaacagagaagagccggcggatactctaggaagtacgccagcaaggccaagaatctggccgacgacatggtccgaaacaccgccagagatctgctgtactacgccgtgacacaggacgccatgctgatcttcgagaatctgagcagaggcttcggccggcagggcaagagaacctttatggccgagaggcagtacaccagaatggaagattggctcacagctaaactggcctacgagggactgagcaagacctacctgtccaaaacactggcccagtatacctccaagacctgcagcaattgcggcttcaccatcaccagcgccgactacgacagagtgctggaaaagctcaagaaaaccgccaccggctggatgaccaccatcaacggcaaagagctgaaggttgagggccagatcacctactacaacaggtacaagaggcagaacgtcgtgaaggatctgagcgtggaactggacagactgagcgaagagagcgtgaacaacgacatcagcagctggacaaagggcagatcaggcgaggctctgagcctgctgaagaagaggtttagccacagacctgtgcaagagaagttcgtgtgcctgaactgcggcttcgagacacacgccgatgaacaggctgccctgaacattgccagaagctggctgttcctgagaagccaagagtacaagaagtaccagaccaacaagaccaccggcaacaccgacaagagggcctttgtggaaacctggcagagcttctacagaaaaaagctgaaagaagtctggaagcccgccgtgactagtccaaaaaagaagagaaaggta

SEQ ID NO: 258 - protein, 997 aa, synthetic construct
  REGION 1..997: note = CasX variant 494
MAPKKKRKVSRQEIKRINKIRRRLVKDSNTKKAGKTGPMKTLLVRVMTPDLRERLENLRKKPENIPQPISNTSRANLNKLLTDYTEMKKAILHVYWEEFQKDPVGLMSRVAQPASKKIDQNKLKPEMDEKGNLTTAGFACSQCGQPLFVYKLEQVSEKGKAYTNYFGRCNVAEHEKLILLAQLKPEKDSDEAVTYSLGKFGQRALDFYSIHVTRESNHPVKPLEQIGGNSCASGPVGKALSDACMGAVASFLTKYQDIILEHQKVIKKNEKRLANLKDIASANGLAFPKITLPPQPHTKEGIEAYNNVVAQIVIWVNLNLWQKLKIGRDEAKPLQRLKGFPSFPLVERQANEVDWWDMVCNVKKLINEKKEDGKVFWQNLAGYKRQEALRPYLSSEEDRKKGKKFARYQLGDLLLHLEKKHGEDWGKVYDEAWERIDKKVEGLSKHIKLEEERRSEDAQSKAALTDWLRAKASFVIEGLKEADKDEFCRCELKLQKWYGDLRGKPFAIEAENSILDISGFSKQYNCAFIWQKDGVKKLNLYLIINYFKGGKLRFKKIKPEAFEANRFYTVINKKSGEIVPMEVNFNFDDPNLIILPLAFGKRQGREFIWNDLLSLETGSLKLANGRVIEKTLYNRRTRQDEPALFVALTFERREVLDSSNIKPMNLIGVDRGENIPAVIALTDPEGCPLSRFKDSLGNPTHILRIGESYKEKQRTIQAKKEVEQRRAGGYSRKYASKAKNLADDMVRNTARDLLYYAVTQDAMLIFENLSRGFGRQGKRTFMAERQYTRMEDWLTAKLAYEGLSKTYLSKTLAQYTSKTCSNCGFTITSADYDRVLEKLKKTATGWMTTINGKELKVEGQITYYNRYKRQNVVKDLSVELDRLSEESVNNDISSWTKGRSGEALSLLKKRFSHRPVQEKFVCLNCGFETHADEQAALNIARSWLFLRSQEYKKYQTNKTTGNTDKRAFVETWQSFYRKKLKEVWKPAVTSPKKKRKV

SEQ ID NO: 259 - DNA, 22 bp, synthetic construct
  misc_feature 1..22: note = T7 promoter primer
  source 1..22: mol_type = other DNA
gaaattaatacgactcactata

SEQ ID NO: 260 - DNA, 87 bp, synthetic construct
  misc_feature 1..87: note = sg2 backbone fwd primer
  source 1..87: mol_type = other DNA
gaaattaatacgactcactataggtactggcgcttttatctcattactttgagagccatcaccagcgactatgtcgtatgggtaaag

SEQ ID NO: 261 - DNA, 78 bp, synthetic construct
  misc_feature 1..78: note = sg2 backbone rev primer
  source 1..78: mol_type = other DNA
ctttgatgcttcttatttatcggatttctctccgataaataagcgctttacccatacgacatagtcgctggtgatggc

SEQ ID NO: 262 - DNA, 54 bp, synthetic construct
  misc_feature 1..54: note = sg2.7.37 spacer primer
  source 1..54: mol_type = other DNA
cggagcgagacatctcggccctttgatgcttcttatttatcggatttctctccg

SEQ ID NO: 263 - DNA, 90 bp, synthetic construct
  misc_feature 1..90: note = sg32 backbone fwd primer
  source 1..90: mol_type = other DNA
gaaattaatacgactcactataggtactggcgcttttatctcattactttgagagccatcaccagcgactatgtcgtatgggtaaagcgc

SEQ ID NO: 264 - DNA, 46 bp, synthetic construct
  misc_feature 1..46: note = sg32 backbone rev primer
  source 1..46: mol_type = other DNA
ctttgatgcttccctccgaagagggcgctttacccatacgacatag

SEQ ID NO: 265 - DNA, 43 bp, synthetic construct
  misc_feature 1..43: note = sg32.7.37 spacer primer
  source 1..43: mol_type = other DNA
cggagcgagacatctcggccctttgatgcttccctccgaagag

SEQ ID NO: 266 - DNA, 90 bp, synthetic construct
  misc_feature 1..90: note = sg64 backbone fwd primer
  source 1..90: mol_type = other DNA
gaaattaatacgactcactataggtactggcgcctttatctcattactttgagagccatcaccagcgactatgtcgtatgggtaaagcgc

SEQ ID NO: 267 - DNA, 54 bp, synthetic construct
  misc_feature 1..54: note = sg64 backbone rev primer
  source 1..54: mol_type = other DNA
ctttgatgcttcttacggaccgaagtccgtaagcgctttacccatacgacatag

SEQ ID NO: 268 - DNA, 45 bp, synthetic construct
  misc_feature 1..45: note = sg64.7.37 spacer primer
  source 1..45: mol_type = other DNA
cggagcgagacatctcggccctttgatgcttcttacggaccgaag

SEQ ID NO: 269 - DNA, 87 bp, synthetic construct
  misc_feature 1..87: note = sg174 backbone fwd primer
  source 1..87: mol_type = other DNA
gaaattaatacgactcactataactggcgcttttatctgattactttgagagccatcaccagcgactatgtcgtagtgggtaaagct

SEQ ID NO: 270 - DNA, 50 bp, synthetic construct
  misc_feature 1..50: note = sg174 backbone rev primer
  source 1..50: mol_type = other DNA
ctttgatgctccctccgaagagggagctttacccactacgacatagtcgc

SEQ ID NO: 271 - DNA, 36 bp, synthetic construct
  misc_feature 1..36: note = sg174.7.37 spacer primer
  source 1..36: mol_type = other DNA
cggagcgagacatctcggccctttgatgctccctcc

SEQ ID NO: 272 - RNA, 130 nt, synthetic construct
  misc_feature 1..130: note = guide RNA
  source 1..130: mol_type = other RNA
ggtactggcgcttttatctcattactttgagagccatcaccagcgactatgtcgtatgggtaaagcgcttatttatcggagagaaatccgataaataagaagcatcaaagggccgagatgtctcgctccg

SEQ ID NO: 273 - RNA, 107 nt, synthetic construct
  misc_feature 1..107: note = guide RNA
  source 1..107: mol_type = other RNA
ggtactggcgcttttatctcattactttgagagccatcaccagcgactatgtcgtatgggtaaagcgccctcttcggagggaagcatcaaagggccgagatgtctcg

SEQ ID NO: 274 - RNA, 120 nt, synthetic construct
  misc_feature 1..120: note = guide RNA
  source 1..120: mol_type = other RNA
ggtactggcgcctttatctcattactttgagagccatcaccagcgactatgtcgtatgggtaaagcgcttacggacttcggtccgtaagaagcatcaaagggccgagatgtctcgctccg

SEQ ID NO: 275 - RNA, 109 nt, synthetic construct
  misc_feature 1..109: note = guide RNA
  source 1..109: mol_type = other RNA
actggcgcttttatctgattactttgagagccatcaccagcgactatgtcgtagtgggtaaagctccctcttcggagggagcatcaaagggccgagatgtctcgctccg

SEQ ID NO: 276 - DNA, 20 bp, synthetic construct
  misc_feature 1..20: note = spacer sequence
  source 1..20: mol_type = other DNA
gaggaggacggcctggccga

SEQ ID NO: 277 - DNA, 20 bp, synthetic construct
  misc_feature 1..20: note = spacer sequence
  source 1..20: mol_type = other DNA
accgctgcgccaaggtgcgg

SEQ ID NO: 278 - DNA, 20 bp, synthetic construct
  misc_feature 1..20: note = spacer sequence
  source 1..20: mol_type = other DNA
gccaggccgtcctcctcgga

SEQ ID NO: 279 - DNA, 20 bp, synthetic construct
  misc_feature 1..20: note = spacer sequence
  source 1..20: mol_type = other DNA
gtgctcgggtgcttcggcca

SEQ ID NO: 280 - DNA, 20 bp, synthetic construct
  misc_feature 1..20: note = spacer sequence
  source 1..20: mol_type = other DNA
atggccttcttcctggcttc

SEQ ID NO: 281 - DNA, 20 bp, synthetic construct
  misc_feature 1..20: note = spacer sequence
  source 1..20: mol_type = other DNA
gcaccaccacgtaggtgcca

SEQ ID NO: 282 - DNA, 20 bp, synthetic construct
  misc_feature 1..20: note = spacer sequence
  source 1..20: mol_type = other DNA
tcctggcttcctggtgaaga

SEQ ID NO: 283 - DNA, 20 bp, synthetic construct
  misc_feature 1..20: note = spacer sequence
  source 1..20: mol_type = other DNA
tggcttcctggtgaagatga

SEQ ID NO: 284 - DNA, 20 bp, synthetic construct
  misc_feature 1..20: note = spacer sequence
  source 1..20: mol_type = other DNA
ccaggaagccaggaagaagg

SEQ ID NO: 285 - DNA, 20 bp, synthetic construct
  misc_feature 1..20: note = spacer sequence
  source 1..20: mol_type = other DNA
tccttgcatggggccaggat

SEQ ID NO: 286 - DNA, 20 bp, synthetic construct
  misc_feature 1..20: note = spacer sequence
  source 1..20: mol_type = other DNA
ggcggcaagttctgctcagc

SEQ ID NO: 287 - DNA, 20 bp, synthetic construct
  misc_feature 1..20: note = spacer sequence
  source 1..20: mol_type = other DNA
tctccacgatcgtcagcgtg

SEQ ID NO: 288 - DNA, 20 bp, synthetic construct
  misc_feature 1..20: note = spacer sequence
  source 1..20: mol_type = other DNA
acgatcgtcagcgtgagtgc

SEQ ID NO: 289 - DNA, 20 bp, synthetic construct
  misc_feature 1..20: note = spacer sequence
  source 1..20: mol_type = other DNA
ctctagcaatggatcgtggg

SEQ ID NO: 290 - DNA, 20 bp, synthetic construct
  misc_feature 1..20: note = spacer sequence
  source 1..20: mol_type = other DNA
caaacaaatgtgtcacaaag

SEQ ID NO: 291 - DNA, 20 bp, synthetic construct
  misc_feature 1..20: note = spacer sequence
  source 1..20: mol_type = other DNA
gatgtgtatatcacagacaa

SEQ ID NO: 292 - DNA, 20 bp, synthetic construct
  misc_feature 1..20: note = spacer sequence
  source 1..20: mol_type = other DNA
ggaataatgctgttgttgaa

SEQ ID NO: 293 - DNA, 20 bp, synthetic construct
  misc_feature 1..20: note = spacer sequence
  source 1..20: mol_type = other DNA
aaatccagtgacaagtctgt

SEQ ID NO: 294 - DNA, 20 bp, synthetic construct
  misc_feature 1..20: note = spacer sequence
  source 1..20: mol_type = other DNA
aggccacagcactgttgctc

SEQ ID NO: 295 - DNA, 20 bp, synthetic construct
  misc_feature 1..20: note = spacer sequence
  source 1..20: mol_type = other DNA
agaagacaccttcttcccca

SEQ ID NO: 296 - DNA, 20 bp, synthetic construct
  misc_feature 1..20: note = spacer sequence
  source 1..20: mol_type = other DNA
tccccagcccaggtaagggc

SEQ ID NO: 297 - DNA, 20 bp, synthetic construct
  misc_feature 1..20: note = spacer sequence
  source 1..20: mol_type = other DNA
ccagcccaggtaagggcagc

SEQ ID NO: 298 - DNA, 20 bp, synthetic construct
  misc_feature 1..20: note = spacer sequence
  source 1..20: mol_type = other DNA
agtccctcaagtccttccag

SEQ ID NO: 299 - DNA, 20 bp, synthetic construct
  misc_feature 1..20: note = spacer sequence
  source 1..20: mol_type = other DNA
agcagcagcagcagcagcag

SEQ ID NO: 300 - DNA, 20 bp, synthetic construct
  misc_feature 1..20: note = spacer sequence
  source 1..20: mol_type = other DNA
tcagccgccgccgcaggcac

SEQ ID NO: 301 - DNA, 20 bp, synthetic construct
  misc_feature 1..20: note = spacer sequence
  source 1..20: mol_type = other DNA
agggtcgccatggcggtctc

SEQ ID NO: 302 - DNA, 20 bp, synthetic construct
  misc_feature 1..20: note = spacer sequence
  source 1..20: mol_type = other DNA
tcagcttttccagggtcgcc

SEQ ID NO: 303 - DNA, 20 bp, synthetic construct
  misc_feature 1..20: note = spacer sequence
  source 1..20: mol_type = other DNA
gccgcagccgcccccgccgc

SEQ ID NO: 304 - DNA, 20 bp, synthetic construct
  misc_feature 1..20: note = spacer sequence
  source 1..20: mol_type = other DNA
gccacagccgggccgggtgg

SEQ ID NO: 305 - DNA, 20 bp, synthetic construct
  misc_feature 1..20: note = spacer sequence
  source 1..20: mol_type = other DNA
tcagccacagccgggccggg

SEQ ID NO: 306 - DNA, 20 bp, synthetic construct
  misc_feature 1..20: note = spacer sequence
  source 1..20: mol_type = other DNA
cggtcggtgcagcggctcct

SEQ ID NO: 307 - DNA, 20 bp, synthetic construct
  misc_feature 1..20: note = spacer sequence
  source 1..20: mol_type = other DNA
ccacaccttcactggtccat

SEQ ID NO: 308 - DNA, 20 bp, synthetic construct
  misc_feature 1..20: note = spacer sequence
  source 1..20: mol_type = other DNA
taaaggaaagtaatggacca

SEQ ID NO: 309 - DNA, 20 bp, synthetic construct
  misc_feature 1..20: note = spacer sequence
  source 1..20: mol_type = other DNA
ctggtccattactttccttt

SEQ ID NO: 310 - DNA, 20 bp, synthetic construct
  misc_feature 1..20: note = spacer sequence
  source 1..20: mol_type = other DNA
atgttcatgagtttggagat

SEQ ID NO: 311 - DNA, 20 bp, synthetic construct
  misc_feature 1..20: note = spacer sequence
  source 1..20: mol_type = other DNA
tgagtttggagataatacag

SEQ ID NO: 312 - DNA, 20 bp, synthetic construct
  misc_feature 1..20: note = spacer sequence
  source 1..20: mol_type = other DNA
atagacacatcggccacacc

SEQ ID NO: 313 - DNA, 20 bp, synthetic construct
  misc_feature 1..20: note = spacer sequence
  source 1..20: mol_type = other DNA
ttattaggcatgttggagac

SEQ ID NO: 314 - DNA, 20 bp, synthetic construct
  misc_feature 1..20: note = spacer sequence
  source 1..20: mol_type = other DNA
caggagaccattgcatcatt

SEQ ID NO: 315 - DNA, 20 bp, synthetic construct
  misc_feature 1..20: note = spacer sequence
  source 1..20: mol_type = other DNA
ggcctggaggctatccagcg

SEQ ID NO: 316 - DNA, 20 bp, synthetic construct
  misc_feature 1..20: note = spacer sequence
  source 1..20: mol_type = other DNA
ggccgagatgtctcgctccg

SEQ ID NO: 317 - DNA, 20 bp, synthetic construct
  misc_feature 1..20: note = spacer sequence
  source 1..20: mol_type = other DNA
aggccagaaagagagagtag

SEQ ID NO: 318 - DNA, 20 bp, synthetic construct
  misc_feature 1..20: note = spacer sequence
  source 1..20: mol_type = other DNA
cgctggatagcctccaggcc

SEQ ID NO: 319 - DNA, 20 bp, synthetic construct
  misc_feature 1..20: note = spacer sequence
  source 1..20: mol_type = other DNA
tgaagctgacagcattcggg

SEQ ID NO: 320 - RNA, 20 nt, synthetic construct
  misc_feature 1..20: note = spacer sequence
  source 1..20: mol_type = other RNA
gaggaggacggcctggccga

SEQ ID NO: 321 - RNA, 20 nt, synthetic construct
  misc_feature 1..20: note = spacer sequence
  source 1..20: mol_type = other RNA
accgctgcgccaaggtgcgg

SEQ ID NO: 322 - RNA, 20 nt, synthetic construct
  misc_feature 1..20: note = spacer sequence
  source 1..20: mol_type = other RNA
gccaggccgtcctcctcgga

SEQ ID NO: 323 - RNA, 20 nt, synthetic construct
  misc_feature 1..20: note = spacer sequence
  source 1..20: mol_type = other RNA
gtgctcgggtgcttcggcca

SEQ ID NO: 324 - RNA, 20 nt, synthetic construct
  misc_feature 1..20: note = spacer sequence
  source 1..20: mol_type = other RNA
atggccttcttcctggcttc

SEQ ID NO: 325 - RNA, 20 nt, synthetic construct
  misc_feature 1..20: note = spacer sequence
  source 1..20: mol_type = other RNA
gcaccaccacgtaggtgcca

SEQ ID NO: 326 - RNA, 20 nt, synthetic construct
  misc_feature 1..20: note = spacer sequence
  source 1..20: mol_type = other RNA
tcctggcttcctggtgaaga

SEQ ID NO: 327 - RNA, 20 nt, synthetic construct
  misc_feature 1..20: note = spacer sequence
  source 1..20: mol_type = other RNA
tggcttcctggtgaagatga

SEQ ID NO: 328 - RNA, 20 nt, synthetic construct
  misc_feature 1..20: note = spacer sequence
  source 1..20: mol_type = other RNA
ccaggaagccaggaagaagg

SEQ ID NO: 329 - RNA, 20 nt, synthetic construct
  misc_feature 1..20: note = spacer sequence
  source 1..20: mol_type = other RNA
tccttgcatggggccaggat

SEQ ID NO: 330 - RNA, 20 nt, synthetic construct
  misc_feature 1..20: note = spacer sequence
  source 1..20: mol_type = other RNA
ggcggcaagttctgctcagc

SEQ ID NO: 331 - RNA, 20 nt, synthetic construct
  misc_feature 1..20: note = spacer sequence
  source 1..20: mol_type = other RNA
tctccacgatcgtcagcgtg

SEQ ID NO: 332 - RNA, 20 nt, synthetic construct
  misc_feature 1..20: note = spacer sequence
  source 1..20: mol_type = other RNA
acgatcgtcagcgtgagtgc

SEQ ID NO: 333 - RNA, 20 nt, synthetic construct
  misc_feature 1..20: note = spacer sequence
  source 1..20: mol_type = other RNA
ctctagcaatggatcgtggg

SEQ ID NO: 334 - RNA, 20 nt, synthetic construct
  misc_feature 1..20: note = spacer sequence
  source 1..20: mol_type = other RNA
caaacaaatgtgtcacaaag

SEQ ID NO: 335 - RNA, 20 nt, synthetic construct
  misc_feature 1..20: note = spacer sequence
  source 1..20: mol_type = other RNA
gatgtgtatatcacagacaa

SEQ ID NO: 336 - RNA, 20 nt, synthetic construct
  misc_feature 1..20: note = spacer sequence
  source 1..20: mol_type = other RNA
ggaataatgctgttgttgaa

SEQ ID NO: 337 - RNA, 20 nt, synthetic construct
  misc_feature 1..20: note = spacer sequence
  source 1..20: mol_type = other RNA
aaatccagtgacaagtctgt

SEQ ID NO: 338 - RNA, 20 nt, synthetic construct
  misc_feature 1..20: note = spacer sequence
  source 1..20: mol_type = other RNA
aggccacagcactgttgctc

SEQ ID NO: 339 - RNA, 20 nt, synthetic construct
  misc_feature 1..20: note = spacer sequence
  source 1..20: mol_type = other RNA
agaagacaccttcttcccca

SEQ ID NO: 340 - RNA, 20 nt, synthetic construct
  misc_feature 1..20: note = spacer sequence
  source 1..20: mol_type = other RNA
tccccagcccaggtaagggc

SEQ ID NO: 341 - RNA, 20 nt, synthetic construct
  misc_feature 1..20: note = spacer sequence
  source 1..20: mol_type = other RNA
ccagcccaggtaagggcagc

SEQ ID NO: 342 - RNA, 20 nt, synthetic construct
  misc_feature 1..20: note = spacer sequence
  source 1..20: mol_type = other RNA
agtccctcaagtccttccag

SEQ ID NO: 343 - RNA, 20 nt, synthetic construct
  misc_feature 1..20: note = spacer sequence
  source 1..20: mol_type = other RNA
agcagcagcagcagcagcag

SEQ ID NO: 344 - RNA, 20 nt, synthetic construct
  misc_feature 1..20: note = spacer sequence
  source 1..20: mol_type = other RNA
tcagccgccgccgcaggcac

SEQ ID NO: 345 - RNA, 20 nt, synthetic construct
  misc_feature 1..20: note = spacer sequence
  source 1..20: mol_type = other RNA
agggtcgccatggcggtctc

SEQ ID NO: 346 - RNA, 20 nt, synthetic construct
  misc_feature 1..20: note = spacer sequence
  source 1..20: mol_type = other RNA
tcagcttttccagggtcgcc

SEQ ID NO: 347 - RNA, 20 nt, synthetic construct
  misc_feature 1..20: note = spacer sequence
  source 1..20: mol_type = other RNA
gccgcagccgcccccgccgc

SEQ ID NO: 348 - RNA, 20 nt, synthetic construct
  misc_feature 1..20: note = spacer sequence
  source 1..20: mol_type = other RNA
gccacagccgggccgggtgg

SEQ ID NO: 349 - RNA, 20 nt, synthetic construct
  misc_feature 1..20: note = spacer sequence
  source 1..20: mol_type = other RNA
tcagccacagccgggccggg

SEQ ID NO: 350 - RNA, 20 nt, synthetic construct
  misc_feature 1..20: note = spacer sequence
  source 1..20: mol_type = other RNA
cggtcggtgcagcggctcct

SEQ ID NO: 351 - RNA, 20 nt, synthetic construct
  misc_feature 1..20: note = spacer sequence
  source 1..20: mol_type = other RNA
ccacaccttcactggtccat

SEQ ID NO: 352 - RNA, 20 nt, synthetic construct
  misc_feature 1..20: note = spacer sequence
  source 1..20: mol_type = other RNA
taaaggaaagtaatggacca

SEQ ID NO: 353 - RNA, 20 nt, synthetic construct
  misc_feature 1..20: note = spacer sequence
  source 1..20: mol_type = other RNA
ctggtccattactttccttt

SEQ ID NO: 354 - RNA, 20 nt, synthetic construct
  misc_feature 1..20: note = spacer sequence
  source 1..20: mol_type = other RNA
atgttcatgagtttggagat

SEQ ID NO: 355 - RNA, 20 nt, synthetic construct
  misc_feature 1..20: note = spacer sequence
  source 1..20: mol_type = other RNA
tgagtttggagataatacag

SEQ ID NO: 356 - RNA, 20 nt, synthetic construct
  misc_feature 1..20: note = spacer sequence
  source 1..20: mol_type = other RNA
atagacacatcggccacacc

SEQ ID NO: 357 - RNA, 20 nt, synthetic construct
  misc_feature 1..20: note = spacer sequence
  source 1..20: mol_type = other RNA
ttattaggcatgttggagac

SEQ ID NO: 358 - RNA, 20 nt, synthetic construct
  misc_feature 1..20: note = spacer sequence
  source 1..20: mol_type = other RNA
caggagaccattgcatcatt

SEQ ID NO: 359 - RNA, 20 nt, synthetic construct
  misc_feature 1..20: note = spacer sequence
  source 1..20: mol_type = other RNA
ggcctggaggctatccagcg

SEQ ID NO: 360 - RNA, 20 nt, synthetic construct
  misc_feature 1..20: note = spacer sequence
  source 1..20: mol_type = other RNA
ggccgagatgtctcgctccg

SEQ ID NO: 361 - RNA, 20 nt, synthetic construct
  misc_feature 1..20: note = spacer sequence
  source 1..20: mol_type = other RNA
aggccagaaagagagagtag

SEQ ID NO: 362 - RNA, 20 nt, synthetic construct
  misc_feature 1..20: note = spacer sequence
  source 1..20: mol_type = other RNA
cgctggatagcctccaggcc

SEQ ID NO: 363 - RNA, 20 nt, synthetic construct
  misc_feature 1..20: note = spacer sequence
  source 1..20: mol_type = other RNA
tgaagctgacagcattcggg

SEQ ID NO: 364 - DNA, 60 bp, synthetic construct
  misc_feature 1..60: note = beta-2 microglobulin (B2M) 7.37 oligonucleotide
  source 1..60: mol_type = other DNA
tgaagctgacagcattcgggccgagatgtctcgctccgtggccttagctgtgctcgcgct

SEQ ID NO: 365 - DNA, 60 bp, synthetic construct; identical to SEQ ID NO: 364
  misc_feature 1..60: note = beta-2 microglobulin (B2M) 7.37 oligonucleotide
  source 1..60: mol_type = other DNA

SEQ ID NO: 366 - DNA, 20 bp, synthetic construct
  misc_feature 1..20: note = spacer sequence
  source 1..20: mol_type = other DNA
tcgccataactcgctaggcc

SEQ ID NO: 367 - DNA, 4667 bp, synthetic construct
  misc_feature 1..4667: note = plasmid pStX17
  source 1..4667: mol_type = other DNA
cctgcaggcagctgcgcgctcgctcgctcactgaggccgcccgggcgtcgggcgacctttggtcgcccggcctcagtgagcgagcgagcgcgcagagagggagtggccaactccatcactaggggttcctgcggcctctagactcgaggcgttgacattgattattgactagttattaatagtaatcaattacggggtcattagttcatagcccatatatggagttccgcgttacataacttacggtaaatggcccgcctggctgaccgcccaacgacccccgcccattgacgtcaataatgacgtatgttcccatagtaacgccaatagggactttccattgacgtcaatgggtggagtatttacggtaaactgcccacttggcagtacatcaagtgtatcatatgccaagtacgccccctattgacgtcaatgacggtaaatggcccgcctggcattatgcccagtacatgaccttatgggactttcctacttggcagtacatctacgtattagtcatcgctattaccatggtgatgcggttttggcagtacatcaatgggcgtggatagcggtttgactcacggggatttccaagtctccaccccattgacgtcaatgggagtttgttttggcaccaaaatcaacgggactttccaaaatgtcgtaacaactccgccccattgacgcaaatgggcggtaggcgtgtacggtgggaggtctatataagcagagctctctggctaactaccggtgccaccatggccccaaagaagaagcggaaggtcagccaagagatcaagagaatcaacaagatcagaaggagactggtcaaggacagcaacacaaagaaggccggcaagacaggccccatgaaaaccctgctcgtcagagtgatgacccctgacctgagagagcggctggaaaacctgagaaagaagcccgagaacatccctcagcctatcagcaacaccagcagggccaacctgaacaagctgctgaccgactacaccgagatgaagaaagccatcctgcacgtgtactgggaagagttccagaaagaccccgtgggcctgatgagcagagttgctcagcccgctcctaagaacatcgaccagagaaagctgatccccgtgaaggacggcaacgagagactgacctctagcggctttgcctgcagccagtgttgccagcctctgtacgtgtacaagctggaacaagtgaacgacaagggcaagccccacaccaactacttcggcagatgcaacgtgtccgagcacgagaggctgatcctgctgtctcctcacaagcccgaggccaacgatgagctggtcacatacagcctgggcaagttcggacagagagccctggacttctacagcatccacgtgaccagggagagcaatcaccctgtgaagcccctggaacagatcggcggcaatagctgtgcctctggacctgtgggaaaagccctgagcgacgcctgtatgggagccgtggcatccttcctgaccaagtaccaggacatcatcctggaacaccagaaagtgatcaagaagaacgagaaaagactggccaacctcaaggatatcgccagcgctaacggcctggcctttcctaagatcaccctgcctccacagcctcacaccaaagagggcatcgaggcctacaacaacgtggtggcccagatcgtgatttgggtcaacctgaatctgtggcagaagctgaagatcggcagggacgaagccaagccactgcagagactgaagggcttccctagcttccctctggtggaaagacaggccaatgaagtggattggtgggacatggtctgcaacgtgaagaagctgatcaacgagaagaaagaggatggcaaggttttctggcagaacctggccggctacaagagacaagaagccctgctgccttacctgagcagcgaagaggaccggaagaagggcaagaagttcgccagataccagttcggcgacctgctgctgcacctggaaaagaagcacggcgaggactggggcaaagtgtacgatgaggcctgggagagaatcgacaagaaggtggaaggcctgagcaagcacattaagctggaagaggaaagaaggagcgaggacgcccaatctaaagccgctctgaccgattggctgagagccaaggccagctttgtgatcgagggcctgaaagaggccgacaaggacgagttctgcagatgcgagctgaagctgcagaagtggtacggcgatctgagaggcaagcccttcgccattgaggccgagaacagcatcctggacatcagcggcttcagcaagcagtacaactgcgccttcatttggcagaaagacggcgtcaagaaactgaacctgtacctgatcatcaattacttcaaaggcggcaagctgcggttcaagaagatcaaacccgaggccttcgaggctaacagattctacaccgtgatcaacaaaaagtccggcgagatcgtgcccatggaagtgaacttcaacttcgacgaccccaacctgattatcctgcctctggccttcggcaagagacagggcagagagttcatctggaacgatctgctgagcctggaaaccggctctctgaagctggccaatggcagagtgatcgagaaaaccctgtacaacaggagaaccagacaggacgagcctgctctgtttgtggccctgaccttcgagagaagagaggtgctggacagcagcaacatcaagcccatgaacctgatcggcatcgaccggggcgagaatatccctgctgtgatcgccctgacagaccctgaaggatgcccactgagcagattcaaggactccctgggcaaccctacacacatcctgagaatcggcgagagctacaaagagaagcagaggacaatccaggccgccaaagaggtggaacagagaagagccggcggatactctaggaagtacgccagcaaggccaagaatctggccgacgacatggtccgaaacaccgccagagatctgctgtactacgccgtgacacaggacgccatgctgatcttcgagaatctgagcagaggcttcggccggcagggcaagagaacctttatggccgagaggcagtacaccagaatggaagattggctcacagctaaactggcctacgagggactgcccagcaagacctacctgtccaaaacactggcccagtatacctccaagacctgcagcaattgcggcttcaccatcaccagcgccgactacgacagagtgctggaaaagctcaagaaaaccgccaccggctggatgaccaccatcaacggcaaagagctgaaggttgagggccagatcacctactacaacaggtacaagaggcagaacgtcgtgaaggatctgagcgtggaactggacagactgagcgaagagagcgtgaacaacgacatcagcagctggacaaagggcagatcaggcgaggctctgagcctgctgaagaagaggtttagccacagacctgtgcaagagaagttcgtgtgcctgaactgcggcttcgagacacacgccgatgaacaggctgccctgaacattgccagaagctggctgttcctgagaagccaagagtacaagaagtaccagaccaacaagaccaccggcaacaccgacaagagggcctttgtggaaacctggcagagcttctacagaaaaaagctgaaagaagtctggaagcccgccgtgactagtccaaaaaagaagagaaaggtagattacaaagatgacgatgacaaagactacaaggatgatgatgataagggatcctacccatacgatgttccagattacgcttacccatacgatgttccagattacgcttacccatacgatgttccagattacgcttaagaattcctagagctcgctgatcagcctcgactgtgccttctagttgccagccatctgttgtttgcccctcccccgtgccttccttgaccctggaaggtgccactcccactgtcctttcctaataaaatgaggaaattgcatcgcattgtctgagtaggtgtcattctattctggggggtggggtggggcaggacagcaagggggaggattgggaagagaatagcaggcatgctggggaggtaccgtgagggcctatttcccatgattccttcatatttgcatatacgatacaaggctgttagagagataattggaattaatttgactgtaaacacaaagatattagtacaaaatacgtgacgtagaaagtaataatttcttgggtagtttgcagttttaaaattatgttttaaaatggactatcatatgcttaccgtaacttgaaagtatttcgatttcttggctttatatatcttgtggaaaggacgaaacaccgtactggcgcttttatctcattactttgagagccatcaccagcgactatgtcgtatgggtaaagcgcttatttatcggagagaaatccgataaataagaagcatcaaaggggtcttcgagaagacccttttttttggcggccgcaggaacccctagtgatggagttggccactccctctctgcgcgctcgctcgctcactgaggccgggcgaccaaaggtcgcccgacgcccgggctttgcccgggcggcctcagtgagcgagcgagcgcgcagctgcctgcagg

SEQ ID NO: 368 - DNA, 20 bp, synthetic construct
  misc_feature 1..20: note = spacer sequence
  source 1..20: mol_type = other DNA
gcacgcacacggccttcgtc

SEQ ID NO: 369 - DNA, 20 bp, synthetic construct
  misc_feature 1..20: note = spacer sequence
  source 1..20: mol_type = other DNA
gcacgcacacgaccttcgtc

SEQ ID NO: 370 - RNA, 20 nt, synthetic construct
  misc_feature 1..20: note = spacer sequence
  source 1..20: mol_type = other RNA
gcacgcacacggccttcgtc

SEQ ID NO: 371 - RNA, 20 nt, synthetic construct
  misc_feature 1..20: note = spacer sequence
  source 1..20: mol_type = other RNA
gcacgcacacgaccttcgtc

SEQ ID NO: 372 - RNA, 20 nt, synthetic construct
  misc_feature 1..20: note = spacer sequence
  source 1..20: mol_type = other RNA
atcagggatttaaactcagg

SEQ ID NO: 373 - RNA, 20 nt, synthetic construct
  misc_feature 1..20: note = spacer sequence
  source 1..20: mol_type = other RNA
tttgcccccacccccaaacg

SEQ ID NO: 374 - RNA, 20 nt, synthetic construct
  misc_feature 1..20: note = spacer sequence
  source 1..20: mol_type = other RNA
ataaagatatttagctggaa

SEQ ID NO: 375 - RNA, 20 nt, synthetic construct
  misc_feature 1..20: note = spacer sequence
  source 1..20: mol_type = other RNA
ttattgacagtgtttaagct

SEQ ID NO: 376 - RNA, 20 nt, synthetic construct
  misc_feature 1..20: note = spacer sequence
  source 1..20: mol_type = other RNA
agctaaatatctttattgac

SEQ ID NO: 377 - RNA, 20 nt, synthetic construct
  misc_feature 1..20: note = spacer sequence
  source 1..20: mol_type = other RNA
actgttaggatataatttta

SEQ ID NO: 378 - RNA, 20 nt, synthetic construct
  misc_feature 1..20: note = spacer sequence
  source 1..20: mol_type = other RNA
taacagttgagttccagcta

SEQ ID NO: 379 - RNA, 20 nt, synthetic construct
  misc_feature 1..20: note = spacer sequence
  source 1..20: mol_type = other RNA
gtcattttactgttataaga

SEQ ID NO: 380 - RNA, 20 nt, synthetic construct
  misc_feature 1..20: note = spacer sequence
  source 1..20: mol_type = other RNA
ttttactgttataagatttt

SEQ ID NO: 381 - RNA, 20 nt, synthetic construct
  misc_feature 1..20: note = spacer sequence
  source 1..20: mol_type = other RNA
tataacagtaaaatgactga

SEQ ID NO: 382 - RNA, 20 nt, synthetic construct
  misc_feature 1..20: note = spacer sequence
  source 1..20: mol_type = other RNA
taaaatcttataacagtaaa

SEQ ID NO: 383 - RNA, 20 nt, synthetic construct
  misc_feature 1..20: note = spacer sequence
  source 1..20: mol_type = other RNA
atataaatacccataataac

SEQ ID NO: 384 - RNA, 20 nt, synthetic construct
  misc_feature 1..20: note = spacer sequence
  source 1..20: mol_type = other RNA
gcataaacactcacccctcc

SEQ ID NO: 385 - RNA, 20 nt, synthetic construct
  misc_feature 1..20: note = spacer sequence
  source 1..20: mol_type = other RNA
cccctccaacaaagctaaaa

SEQ ID NO: 386 - RNA, 20 nt, synthetic construct
  misc_feature 1..20: note = spacer sequence
  source 1..20: mol_type = other RNA
aacaaagctaaaaaacaaag

SEQ ID NO: 387 - RNA, 20 nt, synthetic construct
  misc_feature 1..20: note = spacer sequence
  source 1..20: mol_type = other RNA
tgctttgttttttagctttg

SEQ ID NO: 388 - RNA, 20 nt, synthetic construct
  misc_feature 1..20: note = spacer sequence
  source 1..20: mol_type = other RNA
ttcttgctttgttttttagc

SEQ ID NO: 389 - RNA, 20 nt, synthetic construct
  misc_feature 1..20: note = spacer sequence
  source 1..20: mol_type = other RNA
ttctttcttgctttgttttt

SEQ ID NO: 390 - RNA, 20 nt, synthetic construct
  misc_feature 1..20: note = spacer sequence
  source 1..20: mol_type = other RNA
ctttctttcttgctttgttt

SEQ ID NO: 391 - RNA, 20 nt, synthetic construct
  misc_feature 1..20: note = spacer sequence
  source 1..20: mol_type = other RNA
ctctttctttcttgctttgt

SEQ ID NO: 392 - RNA, 20 nt, synthetic construct
  misc_feature 1..20: note = spacer sequence
  source 1..20: mol_type = other RNA
ctctctctttctttcttgct

SEQ ID NO: 393 - RNA, 20 nt, synthetic construct
  misc_feature 1..20: note = spacer sequence
  source 1..20: mol_type = other RNA
cgctctctctttctttcttg

SEQ ID NO: 394 - RNA, 20 nt, synthetic construct
  misc_feature 1..20: note = spacer sequence
  source 1..20: mol_type = other RNA
ctcgctctctctttctttct

SEQ ID NO: 395 - RNA, 20 nt, synthetic construct
  misc_feature 1..20: note = spacer sequence
  source 1..20: mol_type = other RNA
ttctctcgctctctctttct

SEQ ID NO: 396 - RNA, 20 nt, synthetic construct
  misc_feature 1..20: note = spacer sequence
  source 1..20: mol_type = other RNA
ctttctctcgctctctcttt

SEQ ID NO: 397 - RNA, 20 nt, synthetic construct
  misc_feature 1..20: note = spacer sequence
  source 1..20: mol_type = other RNA
ctctttctctcgctctctct

SEQ ID NO: 398 - RNA, 20 nt, synthetic construct
  misc_feature 1..20: note = spacer sequence
  source 1..20: mol_type = other RNA
ctctctttctctcgctctct

SEQ ID NO: 399 - RNA, 20 nt, synthetic construct
  misc_feature 1..20: note = spacer sequence
  source 1..20: mol_type = other RNA
ctctctctttctctcgctct

SEQ ID NO: 400 - RNA, 20 nt, synthetic construct
  misc_feature 1..20: note = spacer sequence
  source 1..20: mol_type = other RNA
ctctctctctttctctcgct

SEQ ID NO: 401 - RNA, 20 nt, synthetic construct
  misc_feature 1..20: note = spacer sequence
  source 1..20: mol_type = other RNA
ctctctctctctttctctcg

SEQ ID NO: 402 - RNA, 20 nt, synthetic construct
  misc_feature 1..20: note = spacer sequence
  source 1..20: mol_type = other RNA
ctctctctctctctttctct

SEQ ID NO: 403 - RNA, 20 nt, synthetic construct
  misc_feature 1..20: note = spacer sequence
  source 1..20: mol_type = other RNA
ctctctctctctctctttct

SEQ ID NO: 404 - RNA, 20 nt, synthetic construct
  misc_feature 1..20: note = spacer sequence
  source 1..20: mol_type = other RNA
ctctctctctctctctcttt

SEQ ID NO: 405 - RNA, 20 nt, synthetic construct
  misc_feature 1..20: note = spacer sequence
  source 1..20: mol_type = other RNA
tttctctctctctctctctc

SEQ ID NO: 406 - RNA, 20 nt, synthetic construct
  misc_feature 1..20: note = spacer sequence
  source 1..20: mol_type = other RNA
tttcttttctctctctctct

SEQ ID NO: 407 - RNA, 20 nt, synthetic construct
  misc_feature 1..20: note = spacer sequence
  source 1..20: mol_type = other RNA
ttcttttcttttctctctct

SEQ ID NO: 408 - RNA, 20 nt, synthetic construct
  misc_feature 1..20: note = spacer sequence
  source 1..20: mol_type = other RNA
ttctttcttttcttttctct

SEQ ID NO: 409 - RNA, 20 nt, synthetic construct
  misc_feature 1..20: note = spacer sequence
  source 1..20: mol_type = other RNA
tttctttctttcttttcttt

SEQ ID NO: 410 - RNA, 20 nt, synthetic construct
  misc_feature 1..20: note = spacer sequence
  source 1..20: mol_type = other RNA
aattgtaacattcctttctt

SEQ ID NO: 411 - RNA, 20 nt, synthetic construct
  misc_feature 1..20: note = spacer sequence
  source 1..20: mol_type = other RNA
accaagttcaaattgtaaca

SEQ ID NO: 412 - RNA, 20 nt, synthetic construct
  misc_feature 1..20: note = spacer sequence
  source 1..20: mol_type = other RNA
tttttaatcaaatgtcacaa

SEQ ID NO: 413 - RNA, 20 nt, synthetic construct
  misc_feature 1..20: note = spacer sequence
  source 1..20: mol_type = other RNA
aatgtcacaaaatctcagtt

SEQ ID NO: 414 - RNA, 20 nt, synthetic construct
  misc_feature 1..20: note = spacer sequence
  source 1..20: mol_type = other RNA
caaaatctcagtttttgttt

SEQ ID NO: 415 - RNA, 20 nt, synthetic construct
  misc_feature 1..20: note = spacer sequence
  source 1..20: mol_type = other RNA
cagtttttgtttcctataaa

SEQ ID NO: 416 - RNA, 20 nt, synthetic construct
  misc_feature 1..20: note = spacer sequence
  source 1..20: mol_type = other RNA
gtttttgtttcctataaaga

SEQ ID NO: 417 - RNA, 20 nt, synthetic construct
  misc_feature 1..20: note = spacer sequence
  source 1..20: mol_type = other RNA
tataaagagaaatttaaaat

SEQ ID NO: 418 - RNA, 20 nt, synthetic construct
  misc_feature 1..20: note = spacer sequence
  source 1..20: mol_type = other RNA
ttataggaaacaaaaactga

SEQ ID NO: 419 - RNA, 20 nt, synthetic construct
  misc_feature 1..20: note = spacer sequence
  source 1..20: mol_type = other RNA
ctttataggaaacaaaaact

SEQ ID NO: 420 - RNA, 20 nt, synthetic construct
  misc_feature 1..20: note = spacer sequence
  source 1..20: mol_type = other RNA
attaaaactgtagatttaaa

SEQ ID NO: 421 - RNA, 20 nt, synthetic construct
  misc_feature 1..20: note = spacer sequence
  source 1..20: mol_type = other RNA
acagttttaatggaatttta

SEQ ID NO: 422 - RNA, 20 nt, synthetic construct
  misc_feature 1..20: note = spacer sequence
  source 1..20: mol_type = other RNA
ttttagtcaaatgtcacaaa

SEQ ID NO: 423 - RNA, 20 nt, synthetic construct
  misc_feature 1..20: note = spacer sequence
  source 1..20: mol_type = other RNA
aatgtcacaaaatctcagtc

SEQ ID NO: 424 - RNA, 20 nt, synthetic construct
  misc_feature 1..20: note = spacer sequence
  source 1..20: mol_type = other RNA
caaaatctcagtctttgttt

SEQ ID NO: 425 - RNA, 20 nt, synthetic construct
  misc_feature 1..20: note = spacer sequence
  source 1..20: mol_type = other RNA
cagtctttgtttcctataga

SEQ ID NO: 426 - RNA, 20 nt, synthetic construct
  misc_feature 1..20: note = spacer sequence
  source 1..20: mol_type = other RNA
gtctttgtttcctatagaaa

SEQ ID NO: 427 - RNA, 20 nt, synthetic construct
  misc_feature 1..20: note = spacer sequence
  source 1..20: mol_type = other RNA
ttgtttcctatagaaattta

SEQ ID NO: 428 - RNA, 20 nt, synthetic construct
  misc_feature 1..20: note = spacer sequence
  source 1..20: mol_type = other RNA
tatagaaatttaaaaatcca

SEQ ID NO: 429 - RNA, 20 nt, synthetic construct
  misc_feature 1..20: note = spacer sequence
  source 1..20: mol_type = other RNA
ataggaaacaaagactgaga

SEQ ID NO: 430 - RNA, 20 nt, synthetic construct
  misc_feature 1..20: note = spacer sequence
  source 1..20: mol_type = other RNA
ataaaaacttactaatcctg

SEQ ID NO: 431 - RNA, 20 nt, synthetic construct
  misc_feature 1..20: note = spacer sequence
  source 1..20: mol_type = other RNA
tgttagcttgttgtgaaagt

SEQ ID NO: 432 - RNA, 20 nt, synthetic construct
  misc_feature 1..20: note = spacer sequence
  source 1..20: mol_type = other RNA
caacaagctaacaggattag

SEQ ID NO: 433 - RNA, 20 nt, synthetic construct
  misc_feature 1..20: note = spacer sequence
  source 1..20: mol_type = other RNA
aatatacattaacaatcttt

SEQ ID NO: 434 - RNA, 20 nt, synthetic construct
  misc_feature 1..20: note = spacer sequence
  source 1..20: mol_type = other RNA
ttaaaaatatcaaaatagag

SEQ ID NO: 435 - RNA, 20 nt, synthetic construct
  misc_feature 1..20: note = spacer sequence
  source 1..20: mol_type = other RNA
aaatagagcatctcagtctc

SEQ ID NO: 436 - RNA, 20 nt, synthetic construct
  misc_feature 1..20: note = spacer sequence
  source 1..20: mol_type = other RNA
attttgatatttttaaagat

SEQ ID NO: 437 - RNA, 20 nt, synthetic construct
  misc_feature 1..20: note = spacer sequence
  source 1..20: mol_type = other RNA
cagtctccgaaacatgtttt

SEQ ID NO: 438 - RNA, 20 nt, synthetic construct
  misc_feature 1..20: note = spacer sequence
  source 1..20: mol_type = other RNA
gtctccgaaacatgtttttt

SEQ ID NO: 439 - RNA, 20 nt, synthetic construct
  misc_feature 1..20: note = spacer sequence
  source 1..20: mol_type = other RNA
ccgaaacatgttttttcaca

SEQ ID NO: 440 - RNA, 20 nt, synthetic construct
  misc_feature 1..20: note = spacer sequence
  source 1..20: mol_type = other RNA
gaaacatgttttttcacacg

SEQ ID NO: 441 - RNA, 20 nt, synthetic construct
  misc_feature 1..20: note = spacer sequence
  source 1..20: mol_type = other RNA
gagactgagatgctctattt

SEQ ID NO: 442 - RNA, 20 nt, synthetic construct
  misc_feature 1..20: note = spacer sequence
  source 1..20: mol_type = other RNA
cacgcaggatttgacggtgt

SEQ ID NO: 443 - RNA, 20 nt, synthetic construct
  misc_feature 1..20: note = spacer sequence
  source 1..20: mol_type = other RNA
tgcgtgtgaaaaaacatgtt

SEQ ID NO: 444 - RNA, 20 nt, synthetic construct
  misc_feature 1..20: note = spacer sequence
  source 1..20: mol_type = other RNA
aatcctgcgtgtgaaaaaac

SEQ ID NO: 445 - RNA, 20 nt, synthetic construct
  misc_feature 1..20: note = spacer sequence
  source 1..20: mol_type = other RNA
tcagtcaaatctcactggaa

SEQ ID NO: 446 - RNA, 20 nt, synthetic construct
  misc_feature 1..20: note = spacer sequence
  source 1..20: mol_type = other RNA
gtcaaatctcactggaagtt

SEQ ID NO: 447 - RNA, 20 nt, synthetic construct
  misc_feature 1..20: note = spacer sequence
  source 1..20: mol_type = other RNA
aatctcactggaagttaccc

SEQ ID NO: 448 - RNA, 20 nt, synthetic construct
  misc_feature 1..20: note = spacer sequence
  source 1..20: mol_type = other RNA
cactggaagttaccccgccc

SEQ ID NO: 449 - RNA, 20 nt, synthetic construct
  misc_feature 1..20: note = spacer sequence
  source 1..20: mol_type = other RNA
ctggaagttaccccgccccc

SEQ ID NO: 450 - RNA, 20 nt, synthetic construct
  misc_feature 1..20: note = spacer sequence
  source 1..20: mol_type = other RNA
agtgagatttgactgatgac

SEQ ID NO: 451 - RNA, 20 nt, synthetic construct
  misc_feature 1..20: note = spacer sequence
  source 1..20: mol_type = other RNA
cacagcacatggcctgcctg

SEQ ID NO: 452 - RNA, 20 nt, synthetic construct
  misc_feature 1..20: note = spacer sequence
  source 1..20: mol_type = other RNA
tgtcacacagcacatggcct

SEQ ID NO: 453 - RNA, 20 nt, synthetic construct
  misc_feature 1..20: note = spacer sequence
  source 1..20: mol_type = other RNA
gcctgctgtgcttcttgtca

SEQ ID NO: 454 - RNA, 20 nt, synthetic construct
  misc_feature 1..20: note = spacer sequence
  source 1..20: mol_type = other RNA
taaactgtcggcctgctgtg

SEQ ID NO: 455 - RNA, 20 nt, synthetic construct
  misc_feature 1..20: note = spacer sequence
  source 1..20: mol_type = other RNA
ccaaatgttatcgacaaaca

SEQ ID NO: 456 - RNA, 20 nt, synthetic construct
  misc_feature 1..20: note = spacer sequence
  source 1..20: mol_type = other RNA
aaatgttatcgacaaacaaa

SEQ ID NO: 457 - RNA, 20 nt, synthetic construct
  misc_feature 1..20: note = spacer sequence
  source 1..20: mol_type = other RNA
acaaacaaacagaggaccat

SEQ ID NO: 458 - RNA, 20 nt, synthetic construct
  misc_feature 1..20: note = spacer sequence
  source 1..20: mol_type = other RNA
ataacatttggagacacgcg

SEQ ID NO: 459 - RNA, 20 nt, synthetic construct
  misc_feature 1..20: note = spacer sequence
  source 1..20: mol_type = other RNA
gtttgtttgtcgataacatt

SEQ ID NO: 460 - RNA, 20 nt, synthetic construct
  misc_feature 1..20: note = spacer sequence
  source 1..20: mol_type = other RNA
tctgtttgtttgtcgataac

SEQ ID NO: 461 - RNA, 20 nt, synthetic construct
  misc_feature 1..20: note = spacer sequence
  source 1..20: mol_type = other RNA
gtgagacttcagagaatctg

SEQ ID NO: 462 - RNA, 20 nt, synthetic construct
  misc_feature 1..20: note = spacer sequence
  source 1..20: mol_type = other RNA
cagatacccggcagcacatg

SEQ ID NO: 463 - RNA, 20 nt, synthetic construct
  misc_feature 1..20: note = spacer sequence
  source 1..20: mol_type = other RNA
cacagatacccggcagcaca

SEQ ID NO: 464 - RNA, 20 nt, synthetic construct
  misc_feature 1..20: note = spacer sequence
  source 1..20: mol_type = other RNA
gagaatctgaagccctggac

SEQ ID NO: 465 - RNA, 20 nt, synthetic construct
  misc_feature 1..20: note = spacer sequence
  source 1..20: mol_type = other RNA
gaagtctcacagatacccgg

SEQ ID NO: 466 - RNA, 20 nt, synthetic construct
  misc_feature 1..20: note = spacer sequence
  source 1..20: mol_type = other RNA
ctgaagtctcacagataccc

SEQ ID NO: 467 - RNA, 20 nt, synthetic construct
  misc_feature 1..20: note = spacer sequence
  source 1..20: mol_type = other RNA
gaagccctggaccatatttg

SEQ ID NO: 468 - RNA, 20 nt, synthetic construct
  misc_feature 1..20: note = spacer sequence
  source 1..20: mol_type = other RNA
gattctctgaagtctcacag

SEQ ID NO: 469 - RNA, 20 nt, synthetic construct
  misc_feature 1..20: note = spacer sequence
  source 1..20: mol_type = other RNA
agggcttcagattctctgaa

SEQ ID NO: 470 - RNA, 20 nt, synthetic construct
  misc_feature 1..20: note = spacer sequence
  source 1..20: mol_type = other RNA
cacaaacaaatatggtccag

SEQ ID NO: 471 - RNA, 20 nt, synthetic construct
  misc_feature 1..20: note = spacer sequence
  source 1..20: mol_type = other RNA
tcccacaaacaaatatggtc

SEQ ID NO: 472 - RNA, 20 nt, synthetic construct
  misc_feature 1..20: note = spacer sequence
  source 1..20: mol_type = other RNA
cttcccacaaacaaatatgg

SEQ ID NO: 473 - RNA, 20 nt, synthetic construct
  misc_feature 1..20: note = spacer sequence
  source 1..20: mol_type = other RNA
gtgcagttcctcttcctttg

SEQ ID NO: 474 - RNA, 20 nt, synthetic construct
  misc_feature 1..20: note = spacer sequence
  source 1..20: mol_type = other RNA
tcttcctttgccgcccctcc

SEQ ID NO: 475 - RNA, 20 nt, synthetic construct
  misc_feature 1..20: note = spacer sequence
  source 1..20: mol_type = other RNA
tcctttgccgcccctccctg

SEQ ID NO: 476 - RNA, 20 nt, synthetic construct
  misc_feature 1..20: note = spacer sequence
  source 1..20: mol_type = other RNA
tttgccgcccctccctgccg

SEQ ID NO: 477 - RNA, 20 nt, synthetic construct
  misc_feature 1..20: note = spacer sequence
  source 1..20: mol_type = other RNA
ctgccgcctgactgtcttcg

SEQ ID NO: 478 - RNA, 20 nt, synthetic construct
  misc_feature 1..20: note = spacer sequence
  source 1..20: mol_type = other RNA
ggcggcagggaggggcggca

SEQ ID NO: 479 - RNA, 20 nt, synthetic construct
  misc_feature 1..20: note = spacer sequence
  source 1..20: mol_type = other RNA
tcggttttcagaatcgagct

SEQ ID NO: 480 - RNA, 20 nt, synthetic construct
  misc_feature 1..20: note = spacer sequence
  source 1..20: mol_type = other RNA
gttttcagaatcgagctcca

SEQ ID NO: 481 - RNA, 20 nt, synthetic construct
  misc_feature 1..20: note = spacer sequence
  source 1..20: mol_type = other RNA
gaatcgagctccaggccatc

SEQ ID NO: 482 - RNA, 20 nt, synthetic construct
  misc_feature 1..20: note = spacer sequence
  source 1..20: mol_type = other RNA
gaaaaccgaagacagtcagg

SEQ ID NO: 483 - RNA, 20 nt, synthetic construct
  misc_feature 1..20: note = spacer sequence
  source 1..20: mol_type = other RNA
agctccaggccatctccatg

SEQ ID NO: 484 - RNA, 20 nt, synthetic construct
  misc_feature 1..20: note = spacer sequence
  source 1..20: mol_type = other RNA
attctgaaaaccgaagacag

SEQ ID NO: 485 - RNA, 20 nt, synthetic construct
  misc_feature 1..20: note = spacer sequence
  source 1..20: mol_type = other RNA
aggccatctccatggaacat

SEQ ID NO: 486 - RNA, 20 nt, synthetic construct
  misc_feature 1..20: note = spacer sequence
  source 1..20: mol_type = other RNA
ccatggaacatcagaccaaa

SEQ ID NO: 487 - RNA, 20 nt, synthetic construct
  misc_feature 1..20: note = spacer sequence
  source 1..20: mol_type = other RNA
atggaacatcagaccaaaat

SEQ ID NO: 488 - RNA, 20 nt, synthetic construct
  misc_feature 1..20: note = spacer sequence
  source 1..20: mol_type = other RNA
atggagatggcctggagctc

SEQ ID NO: 489 - RNA, 20 nt, synthetic construct
  misc_feature 1..20: note = spacer sequence
  source 1..20: mol_type = other RNA
gaccaaaatagaacctcaca

SEQ ID NO: 490 - RNA, 20 nt, synthetic construct
  misc_feature 1..20: note = spacer sequence
  source 1..20: mol_type = other RNA
gatgttccatggagatggcc

SEQ ID NO: 491 - RNA, 20 nt, synthetic construct
  misc_feature 1..20: note = spacer sequence
  source 1..20: mol_type = other RNA
attttggtctgatgttccat

SEQ ID NO: 492 - RNA, 20 nt, synthetic construct
  misc_feature 1..20: note = spacer sequence
  source 1..20: mol_type = other RNA
cacttcacgggtactgcaca

SEQ ID NO: 493 - RNA, 20 nt, synthetic construct
  misc_feature 1..20: note = spacer sequence
  source 1..20: mol_type = other RNA
cgggtactgcacagaggcac

SEQ ID NO: 494 - RNA, 20 nt, synthetic construct
  misc_feature 1..20: note = spacer sequence
  source 1..20: mol_type = other RNA
gtgcagtacccgtgaagtgt

SEQ ID NO: 495 - RNA, 20 nt, synthetic construct
  misc_feature 1..20: note = spacer sequence
  source 1..20: mol_type = other RNA
tgcccatgcagaccaagcgg

SEQ ID NO: 496 - RNA, 20 nt, synthetic construct
  misc_feature 1..20: note = spacer sequence
  source 1..20: mol_type = other RNA
gcatgggcaggacgtgcctc

SEQ ID NO: 497 - RNA, 20 nt, synthetic construct
  misc_feature 1..20: note = spacer sequence
  source 1..20: mol_type = other RNA
gtgctcagcacttggcaatt

SEQ ID NO: 498 - RNA, 20 nt, synthetic construct
  misc_feature 1..20: note = spacer sequence
  source 1..20: mol_type = other RNA
gcacttggcaattcctctct

SEQ ID NO: 499 - RNA, 20 nt, synthetic construct
  misc_feature 1..20: note = spacer sequence
  source 1..20: mol_type = other RNA
tctctctgaagcaaggtgcc

SEQ ID NO: 500 - RNA, 20 nt, synthetic construct
  misc_feature 1..20: note = spacer sequence
  source 1..20: mol_type = other RNA
ctctgaagcaaggtgccttc

SEQ ID NO: 501 - RNA, 20 nt, synthetic construct
  misc_feature 1..20: note = spacer sequence
  source 1..20: mol_type = other RNA
ctgaagcaaggtgccttcga

SEQ ID NO: 502 - RNA, 20 nt, synthetic construct
  misc_feature 1..20: note = spacer sequence
  source 1..20: mol_type = other RNA
gaagcaaggtgccttcgact

SEQ ID NO: 503 - RNA, 20 nt, synthetic construct
  misc_feature 1..20: note = spacer sequence
  source 1..20: mol_type = other RNA
gagagaggaattgccaagtg

SEQ ID NO: 504 - RNA, 20 nt, synthetic construct
  misc_feature 1..20: note = spacer sequence
  source 1..20: mol_type = other RNA
actttcacggctatcacaga

SEQ ID NO: 505 - RNA, 20 nt, synthetic construct
  misc_feature 1..20: note = spacer sequence
  source 1..20: mol_type = other RNA
aaggcaccttgcttcagaga

SEQ ID NO: 506 - RNA, 20 nt, synthetic construct
  misc_feature 1..20: note = spacer sequence
  source 1..20: mol_type = other RNA
cggctatcacagaggccttt

SEQ ID NO: 507 - RNA, 20 nt, synthetic construct
  misc_feature 1..20: note = spacer sequence
  source 1..20: mol_type = other RNA
cagaggcctttcctgttcaa

SEQ ID NO: 508 - RNA, 20 nt, synthetic construct
  misc_feature 1..20: note = spacer sequence
  source 1..20: mol_type = other RNA
gtgatagccgtgaaagtcga

SEQ ID NO: 509 - RNA, 20 nt, synthetic construct
  misc_feature 1..20: note = spacer sequence
  source 1..20: mol_type = other RNA
tgttcaacaaacgctgctta

SEQ ID NO: 510 - RNA, 20 nt, synthetic construct
  misc_feature 1..20: note = spacer sequence
  source 1..20: mol_type = other RNA
acaaacgctgcttaatctac

SEQ ID NO: 511 - RNA, 20 nt, synthetic construct
  misc_feature 1..20: note = spacer sequence
  source 1..20: mol_type = other RNA
acttcctgcaggagggacac

SEQ ID NO: 512 - RNA, 20 nt, synthetic construct
  misc_feature 1..20: note = spacer sequence
  source 1..20: mol_type = other RNA
tgcaggagggacactggtct

SEQ ID NO: 513 - RNA, 20 nt, synthetic construct
  misc_feature 1..20: note = spacer sequence
  source 1..20: mol_type = other RNA
tgcaggaagtagattaagca

SEQ ID NO: 514 - RNA, 20 nt, synthetic construct
  misc_feature 1..20: note = spacer sequence
  source 1..20: mol_type = other RNA
ctcctgcaggaagtagatta

SEQ ID NO: 515 - RNA, 20 nt, synthetic construct
  misc_feature 1..20: note = spacer sequence
  source 1..20: mol_type = other RNA
ggactgcagagcacaagctt

SEQ ID NO: 516 - RNA, 20 nt, synthetic construct
  misc_feature 1..20: note = spacer sequence
  source 1..20: mol_type = other RNA
agaccagtgtccctcctgca

SEQ ID NO: 517 - RNA, 20 nt, synthetic construct
  misc_feature 1..20: note = spacer sequence
  source 1..20: mol_type = other RNA
gcagtccagaccagtgtccc

SEQ ID NO: 518 - RNA, 20 nt, synthetic construct
  misc_feature 1..20: note = spacer sequence
  source 1..20: mol_type = other RNA
acttggcatcagacagacac

SEQ ID NO: 519 - RNA, 20 nt, synthetic construct
  misc_feature 1..20: note = spacer sequence
  source 1..20: mol_type = other RNA
gacagacacgcctgaggttt

SEQ ID NO: 520 - RNA, 20 nt, synthetic construct
  misc_feature 1..20: note = spacer sequence
  source 1..20: mol_type = other RNA
gatgccaagtggaagcttgt

SEQ ID NO: 521 - RNA, 20 nt, synthetic construct
  misc_feature 1..20: note = spacer sequence
  source 1..20: mol_type = other RNA
gtctgatgccaagtggaagc

SEQ ID NO: 522 - RNA, 20 nt, synthetic construct
  misc_feature 1..20: note = spacer sequence
  source 1..20: mol_type = other RNA
ggcgtgtctgtctgatgcca

SEQ ID NO: 523 - RNA, 20 nt, synthetic construct
  misc_feature 1..20: note = spacer sequence
  source 1..20: mol_type = other RNA
aaggatctgactctgcaact

SEQ ID NO: 524 - RNA, 20 nt, synthetic construct
  misc_feature 1..20: note = spacer sequence
  source 1..20: mol_type = other RNA
tttgataaacctcaggcgtg

SEQ ID NO: 525 - RNA, 20 nt, synthetic construct
  misc_feature 1..20: note = spacer sequence
  source 1..20: mol_type = other RNA
gactctgcaactccagcgct

SEQ ID NO: 526 - RNA, 20 nt, synthetic construct
  misc_feature 1..20: note = spacer sequence
  source 1..20: mol_type = other RNA
gatcctttgataaacctcag

SEQ ID NO: 527 - RNA, 20 nt, synthetic construct
  misc_feature 1..20: note = spacer sequence
  source 1..20: mol_type = other RNA
gcaactccagcgctggccct

SEQ ID NO: 528 - RNA, 20 nt, synthetic construct
  misc_feature 1..20: note = spacer sequence
  source 1..20: mol_type = other RNA
agcgctggccctaattgcct

SEQ ID NO: 529 - RNA, 20 nt, synthetic construct
  misc_feature 1..20: note = spacer sequence
  source 1..20: mol_type = other RNA
ccaacaccacagcaggaata

SEQ ID NO: 530 - RNA, 20 nt, synthetic construct
  misc_feature 1..20: note = spacer sequence
  source 1..20: mol_type = other RNA
aacaccacagcaggaataac

SEQ ID NO: 531 - RNA, 20 nt, synthetic construct
  misc_feature 1..20: note = spacer sequence
  source 1..20: mol_type = other RNA
tgctgtggtgttggagaaag

SEQ ID NO: 532 - RNA, 20 nt, synthetic construct
  misc_feature 1..20: note = spacer sequence
  source 1..20: mol_type = other RNA
aaaaatggttattcctgctg

SEQ ID NO: 533 - RNA, 20 nt, synthetic construct
  misc_feature 1..20: note = spacer sequence
  source 1..20: mol_type = other RNA
tgttcaaaaaatggttattc

SEQ ID NO: 534 - RNA, 20 nt, synthetic construct
  misc_feature 1..20: note = spacer sequence
  source 1..20: mol_type = other RNA
tggaacgctggaacttttat

SEQ ID NO: 535 - RNA, 20 nt, synthetic construct
  misc_feature 1..20: note = spacer sequence
  source 1..20: mol_type = other RNA
aagagctgcttcttgttcaa

SEQ ID NO: 536 - RNA, 20 nt, synthetic construct
  misc_feature 1..20: note = spacer sequence
  source 1..20: mol_type = other RNA
agcgttccaagagctgcttc

SEQ ID NO: 537 - RNA, 20 nt, synthetic construct
  misc_feature 1..20: note = spacer sequence
  source 1..20: mol_type = other RNA
ctttttctttttttgagaga

SEQ ID NO: 538 - RNA, 20 nt, synthetic construct
  misc_feature 1..20: note = spacer sequence
  source 1..20: mol_type = other RNA
ttttctttttttgagagaga

SEQ ID NO: 539 - RNA, 20 nt, synthetic construct
  misc_feature 1..20: note = spacer sequence
  source 1..20: mol_type = other RNA
ttttttgagagagagtttcg

SEQ ID NO: 540 - RNA, 20 nt, synthetic construct
  misc_feature 1..20: note = spacer sequence
  source 1..20: mol_type = other RNA
aaaaaagaaaaagagaaaaa

SEQ ID NO: 541 - RNA, 20 nt, synthetic construct
  misc_feature 1..20: note = spacer sequence
  source 1..20: mol_type = other RNA
caaaaaaagaaaaagagaaa

SEQ ID NO: 542 - RNA, 20 nt, synthetic construct
  misc_feature 1..20: note = spacer sequence
  source 1..20: mol_type = other RNA
ctcaaaaaaagaaaaagaga

SEQ ID NO: 543 - RNA, 20 nt, synthetic construct
  misc_feature 1..20: note = spacer sequence
  source 1..20: mol_type = other RNA
ctctcaaaaaaagaaaaaga

SEQ ID NO: 544 - RNA, 20 nt, synthetic construct
  misc_feature 1..20: note = spacer sequence
  source 1..20: mol_type = other RNA
ctcttgttgtccaggctaga

SEQ ID NO: 545 - RNA, 20 nt, synthetic construct
  misc_feature 1..20: note = spacer sequence
  source 1..20: mol_type = other RNA
tgttgtccaggctagagcgc

SEQ ID NO: 546 - RNA, 20 nt, synthetic construct
  misc_feature 1..20: note = spacer sequence
  source 1..20: mol_type = other RNA
aggctagagcgcagtggtgc

SEQ ID NO: 547 - RNA, 20 nt, synthetic construct
  misc_feature 1..20: note = spacer sequence
  source 1..20: mol_type = other RNA
agcctggacaacaagagcga

SEQ ID NO: 548 - RNA, 20 nt, synthetic construct
  misc_feature 1..20: note = spacer sequence
  source 1..20: mol_type = other RNA
caccactgcgctctagcctg

SEQ ID NO: 549 - RNA, 20 nt, synthetic construct
  misc_feature 1..20: note = spacer sequence
  source 1..20: mol_type = other RNA
cggctcactgcaacctccac

SEQ ID NO: 550 - RNA, 20 nt, synthetic construct
  misc_feature 1..20: note = spacer sequence
  source 1..20: mol_type = other RNA
ctgcaacctccacctcccgg

SEQ ID NO: 551 - RNA, 20 nt, synthetic construct
  misc_feature 1..20: note = spacer sequence
  source 1..20: mol_type = other RNA
acctcccgggttcaagcaat

SEQ ID NO: 552 - RNA, 20 nt, synthetic construct
  misc_feature 1..20: note = spacer sequence
  source 1..20: mol_type = other RNA
cgggttcaagcaattctcct

SEQ ID NO: 553 - RNA, 20 nt, synthetic construct
  misc_feature 1..20: note = spacer sequence
  source 1..20: mol_type = other RNA
agcaattctcctgcctcagc

SEQ ID NO: 554 - RNA, 20 nt, synthetic construct
  misc_feature 1..20: note = spacer sequence
  source 1..20: mol_type = other RNA
cctgcctcagcctcctgagt

SEQ ID NO: 555 - RNA, 20 nt, synthetic construct
  misc_feature 1..20: note = spacer sequence
  source 1..20: mol_type = other RNA
tgcctcagcctcctgagtag

SEQ ID NO: 556 - RNA, 20 nt, synthetic construct
  misc_feature 1..20: note = spacer sequence
  source 1..20: mol_type = other RNA
gcctcctgagtagctgggat

SEQ ID NO: 557 - RNA, 20 nt, synthetic construct
  misc_feature 1..20: note = spacer sequence
  source 1..20: mol_type = other RNA
tgagtagctgggattacagg

SEQ ID NO: 558 - RNA, 20 nt, synthetic construct
  misc_feature 1..20: note = spacer sequence
  source 1..20: mol_type = other RNA
ggaggctgaggcaggagaat

SEQ ID NO: 559 - RNA, 20 nt, synthetic construct
  misc_feature 1..20: note = spacer sequence
  source 1..20: mol_type = other RNA
cagctactcaggaggctgag

SEQ ID NO: 560 - RNA, 20 nt, synthetic construct
  misc_feature 1..20: note = spacer sequence
  source 1..20: mol_type = other RNA
cagctaattttgtgtacttt

SEQ ID NO: 561 - RNA, 20 nt, synthetic construct
  misc_feature 1..20: note = spacer sequence
  source 1..20: mol_type = other RNA
actaaaagtacacaaaatta

SEQ ID NO: 562 - RNA, 20 nt, synthetic construct
  misc_feature 1..20: note = spacer sequence
  source 1..20: mol_type = other RNA
ctactaaaagtacacaaaat

SEQ ID NO: 563 - RNA, 20 nt, synthetic construct
  misc_feature 1..20: note = spacer sequence
  source 1..20: mol_type = other RNA
ctgtgttggccaggctggtc

SEQ ID NO: 564 - RNA, 20 nt, synthetic construct
  misc_feature 1..20: note = spacer sequence
  source 1..20: mol_type = other RNA
tgaactcctgacttctggtg

SEQ ID NO: 565 - RNA, 20 nt, synthetic construct
  misc_feature 1..20: note = spacer sequence
  source 1..20: mol_type = other RNA
agaccagcctggccaacaca

SEQ ID NO: 566 - RNA, 20 nt, synthetic construct
  misc_feature 1..20: note = spacer sequence
  source 1..20: mol_type = other RNA
tgacttctggtgatccaccc

SEQ ID NO: 567 - RNA, 20 nt, synthetic construct
  misc_feature 1..20: note = spacer sequence
  source 1..20: mol_type = other RNA
ggagttcaagaccagcctgg

SEQ ID NO: 568 - RNA, 20 nt, synthetic construct
  misc_feature 1..20: note = spacer sequence
  source 1..20: mol_type = other RNA
ggtgatccaccctcagcctc

SEQ ID NO: 569 - RNA, 20 nt, synthetic construct
  misc_feature 1..20: note = spacer sequence
  source 1..20: mol_type = other RNA
ccagaagtcaggagttcaag

SEQ ID NO: 570 - RNA, 20 nt, synthetic construct
  misc_feature 1..20: note = spacer sequence
  source 1..20: mol_type = other RNA
accctcagcctcccaacgtg

SEQ ID NO: 571 - RNA, 20 nt, synthetic construct
  misc_feature 1..20: note = spacer sequence
  source 1..20: mol_type = other RNA
gcctcccaacgtgctgggat

SEQ ID NO: 572 - RNA, 20 nt, synthetic construct
  misc_feature 1..20: note = spacer sequence
  source 1..20: mol_type = other RNA
caacgtgctgggattacagg

SEQ ID NO: 573 - RNA, 20 nt, synthetic construct
  misc_feature 1..20: note = spacer sequence
  source 1..20: mol_type = other RNA
cagcacgttgggaggctgag

SEQ ID NO: 574 - RNA, 20 nt, synthetic construct
  misc_feature 1..20: note = spacer sequence
  source 1..20: mol_type = other RNA
cgcctgtaatcccagcacgt

SEQ ID NO: 575 - RNA, 20 nt, synthetic construct
  misc_feature 1..20: note = spacer sequence
  source 1..20: mol_type = other RNA
tgcccagcctgttactttct

SEQ ID NO: 576 - RNA, 20 nt, synthetic construct
  misc_feature 1..20: note = spacer sequence
  source 1..20: mol_type = other RNA
tttttagagatagggtcttg

SEQ ID NO: 577 - RNA, 20 nt, synthetic construct
  misc_feature 1..20: note = spacer sequence
  source 1..20: mol_type = other RNA
aaaaaagaaagtaacaggct

SEQ ID NO: 578 - RNA, 20 nt, synthetic construct
  misc_feature 1..20: note = spacer sequence
  source 1..20: mol_type = other RNA
ctaaaaaagaaagtaacagg

SEQ ID NO: 579 - RNA, 20 nt, synthetic construct
  misc_feature 1..20: note = spacer sequence
  source 1..20: mol_type = other RNA
tgcttgtctcacaggctgtg

SEQ ID NO: 580 - RNA, 20 nt, synthetic construct
  misc_feature 1..20: note = spacer sequence
  source 1..20: mol_type = other RNA
cacaggctgtgtgtagtggt

SEQ ID NO: 581 - RNA, 20 nt, synthetic construct
  misc_feature 1..20: note = spacer sequence
  source 1..20: mol_type = other RNA
caggctgtgtgtagtggtat

SEQ ID NO: 582 - RNA, 20 nt, synthetic construct
  misc_feature 1..20: note = spacer sequence
  source 1..20: mol_type = other RNA
taccactacacacagcctgt

SEQ ID NO: 583 - RNA, 20 nt, synthetic construct
  misc_feature 1..20: note = spacer sequence
  source 1..20: mol_type = other RNA
aggatctctgcagcctcaac

SEQ ID NO: 584 - RNA, 20 nt, synthetic construct
  misc_feature 1..20: note = spacer sequence
  source 1..20: mol_type = other RNA
ttgatcataccactacacac

SEQ ID NO: 585 - RNA, 20 nt, synthetic construct
  misc_feature 1..20: note = spacer sequence
  source 1..20: mol_type = other RNA
ctgcagcctcaaccttctgt

SEQ ID NO: 586 - RNA, 20 nt, synthetic construct
  misc_feature 1..20: note = spacer sequence
  source 1..20: mol_type = other RNA
gcagcctcaaccttctgtgc

SEQ ID NO: 587 - RNA, 20 nt, synthetic construct
  misc_feature 1..20: note = spacer sequence
  source 1..20: mol_type = other RNA
accttctgtgctcaagtgat

SEQ ID NO: 588 - RNA, 20 nt, synthetic construct
  misc_feature 1..20: note = spacer sequence
  source 1..20: mol_type = other RNA
gtgctcaagtgatcctcctg

SEQ ID NO: 589 - RNA, 20 nt, synthetic construct
  misc_feature 1..20: note = spacer sequence
  source 1..20: mol_type = other RNA
agtgatcctcctgcttcagc

SEQ ID NO: 590 - RNA, 20 nt, synthetic construct
  misc_feature 1..20: note = spacer sequence
  source 1..20: mol_type = other RNA
cttgagcacagaaggttgag

SEQ ID NO: 591 - RNA, 20 nt, synthetic construct
  misc_feature 1..20: note = spacer sequence
  source 1..20: mol_type = other RNA
tcctgcttcagctgcctgag

SEQ ID NO: 592 - RNA, 20 nt, synthetic construct
  misc_feature 1..20: note = spacer sequence
  source 1..20: mol_type = other RNA
tgcttcagctgcctgagtag

SEQ ID NO: 593 - RNA, 20 nt, synthetic construct
  misc_feature 1..20: note = spacer sequence
  source 1..20: mol_type = other RNA
gctgcctgagtagctgggac

SEQ ID NO: 594 - RNA, 20 nt, synthetic construct
  misc_feature 1..20: note = spacer sequence
  source 1..20: mol_type = other RNA
ggcagctgaagcaggaggat

SEQ ID NO: 595 - RNA, 20 nt, synthetic construct
  misc_feature 1..20: note = spacer sequence
  source 1..20: mol_type = other RNA
cagctactcaggcagctgaa

SEQ ID NO: 596 - RNA, 20 nt, synthetic construct
  misc_feature 1..20: note = spacer sequence
  source 1..20: mol_type = other RNA
actaaaaatttaaaaattag

SEQ ID NO: 597 - RNA, 20 nt, synthetic construct
  misc_feature 1..20: note = spacer sequence
  source 1..20: mol_type = other RNA
ctactaaaaatttaaaaatt

SEQ ID NO: 598 - RNA, 20 nt, synthetic construct
  misc_feature 1..20: note = spacer sequence
  source 1..20: mol_type = other RNA
cactatgttgcccaagctgg

SEQ ID NO: 599 - RNA, 20 nt, synthetic construct
  misc_feature 1..20: note = spacer sequence
  source 1..20: mol_type = other RNA
ctatgttgcccaagctggtc

SEQ ID NO: 600 - RNA, 20 nt, synthetic construct
  misc_feature 1..20: note = spacer sequence
  source 1..20: mol_type = other RNA
caaactcctgagctcaagta

SEQ ID NO: 601 - RNA, 20 nt, synthetic construct
  misc_feature 1..20: note = spacer sequence
  source 1..20: mol_type = other RNA
aactcctgagctcaagtaat

SEQ ID NO: 602 - RNA, 20 nt, synthetic construct
  misc_feature 1..20: note = spacer sequence
  source 1..20: mol_type = other RNA
tgagctcaagtaatcctccc

SEQ ID NO: 603 - RNA, 20 nt, synthetic construct
  misc_feature 1..20: note = spacer sequence
  source 1..20: mol_type = other RNA
ggagtttgagaccagcttgg

SEQ ID NO: 604 - RNA, 20 nt, synthetic construct
  misc_feature 1..20: note = spacer sequence
  source 1..20: mol_type = other RNA
agtaatcctcccgcctcagc

SEQ ID NO: 605 - RNA, 20 nt, synthetic construct
  misc_feature 1..20: note = spacer sequence
  source 1..20: mol_type = other RNA
tcccgcctcagcctcccaaa

SEQ ID NO: 606 - RNA, 20 nt, synthetic construct
  misc_feature 1..20: note = spacer sequence
  source 1..20: mol_type = other RNA
cgcctcagcctcccaaagtg

SEQ ID NO: 607 - RNA, 20 nt, synthetic construct
  misc_feature 1..20: note = spacer sequence
  source 1..20: mol_type = other RNA
gcctcccaaagtggtgggat

SEQ ID NO: 608 - RNA, 20 nt, synthetic construct
  misc_feature 1..20: note = spacer sequence
  source 1..20: mol_type = other RNA
caaagtggtgggattacacg

SEQ ID NO: 609 - RNA, 20 nt, synthetic construct
  misc_feature 1..20: note = spacer sequence
  source 1..20: mol_type = other RNA
caccactttgggaggctgag

SEQ ID NO: 610 - RNA, 20 nt, synthetic construct
  misc_feature 1..20: note = spacer sequence
  source 1..20: mol_type = other RNA
cacgtgtaatcccaccactt

SEQ ID NO: 611 - RNA, 20 nt, synthetic construct
  misc_feature 1..20: note = spacer sequence
  source 1..20: mol_type = other RNA
ttgtggctcacacgtgtaat

SEQ ID NO: 612 - RNA, 20 nt, synthetic construct
  misc_feature 1..20: note = spacer sequence
  source 1..20: mol_type = other RNA
ggcacttttattgtaatcct

SEQ ID NO: 613 - RNA, 20 nt, synthetic construct
  misc_feature 1..20: note = spacer sequence
  source 1..20: mol_type = other RNA
tgtgggctactcactgaggt

SEQ ID NO: 614 - RNA, 20 nt, synthetic construct
  misc_feature 1..20: note = spacer sequence
  source 1..20: mol_type = other RNA
ctgaggtaaaccaaggcacc

SEQ ID NO: 615 - RNA, 20 nt, synthetic construct
  misc_feature 1..20: note = spacer sequence
  source 1..20: mol_type = other RNA
gtgagtagcccacaggatta

SEQ ID NO: 616 - RNA, 20 nt, synthetic construct
  misc_feature 1..20: note = spacer sequence
  source 1..20: mol_type = other RNA
ccccaactggtcaagtggaa

SEQ ID NO: 617 - RNA, 20 nt, synthetic construct
  misc_feature 1..20: note = spacer sequence
  source 1..20: mol_type = other RNA
agtggaattctagggacaat

SEQ ID NO: 618 - RNA, 20 nt, synthetic construct
  misc_feature 1..20: note = spacer sequence
  source 1..20: mol_type = other RNA
acttgaccagttggggcgaa

SEQ ID NO: 619 - RNA, 20 nt, synthetic construct
  misc_feature 1..20: note = spacer sequence
  source 1..20: mol_type = other RNA
agggacaatcacagcacagc

SEQ ID NO: 620 - RNA, 20 nt, synthetic construct
  misc_feature 1..20: note = spacer sequence
  source 1..20: mol_type = other RNA
ctagaattccacttgaccag

SEQ ID NO: 621 - RNA, 20 nt, synthetic construct
  misc_feature 1..20: note = spacer sequence
  source 1..20: mol_type = other RNA
cagcacagctgtataaacca

SEQ ID NO: 622 - RNA, 20 nt, synthetic construct
  misc_feature 1..20: note = spacer sequence
  source 1..20: mol_type = other RNA
ctttatttttgtggtttata

SEQ ID NO: 623 - RNA, 20 nt, synthetic construct
  misc_feature 1..20: note = spacer sequence
  source 1..20: mol_type = other RNA
cgttcactttatttttgtgg

SEQ ID NO: 624 - RNA, 20 nt, synthetic construct
  misc_feature 1..20: note = spacer sequence
  source 1..20: mol_type = other RNA
ttgggttcacgttcacttta

SEQ ID NO: 625 - RNA, 20 nt, synthetic construct
  misc_feature 1..20: note = spacer sequence
  source 1..20: mol_type = other RNA
ctttgggttcacgttcactt

SEQ ID NO: 626 - RNA, 20 nt, synthetic construct
  misc_feature 1..20: note = spacer sequence
  source 1..20: mol_type = other RNA
ctctttgggttcacgttcac

SEQ ID NO: 627 - RNA, 20 nt, synthetic construct
  misc_feature 1..20: note = spacer sequence
  source 1..20: mol_type = other RNA
ctctctttgggttcacgttc

SEQ ID NO: 628 - RNA, 20 nt, synthetic construct
  misc_feature 1..20: note = spacer sequence
  source 1..20: mol_type = other RNA
ctctctctttgggttcacgt

SEQ ID NO: 629 - RNA, 20 nt, synthetic construct
  misc_feature 1..20: note = spacer sequence
  source 1..20: mol_type = other RNA
aacgcctgtttctctctctc

SEQ ID NO: 630 - RNA, 20 nt, synthetic construct
  misc_feature 1..20: note = spacer sequence
  source 1..20: mol_type = other RNA
gaaagacactaatggtgtca

SEQ ID NO: 631 - RNA, 20 nt, synthetic construct
  misc_feature 1..20: note = spacer sequence
  source 1..20: mol_type = other RNA
gaagtttcaaacgcctgttt

SEQ ID NO: 632 - RNA, 20 nt, synthetic construct
  misc_feature 1..20: note = spacer sequence
  source 1..20: mol_type = other RNA
ttccgaagtttcaaacgcct

SEQ ID NO: 633 - RNA, 20 nt, synthetic construct
  misc_feature 1..20: note = spacer sequence
  source 1..20: mol_type = other RNA
cttcaactatgattcttata

SEQ ID NO: 634 - RNA, 20 nt, synthetic construct
  misc_feature 1..20: note = spacer sequence
  source 1..20: mol_type = other RNA
actatgattcttataatttg

SEQ ID NO: 635 - RNA, 20 nt, synthetic construct
  misc_feature 1..20: note = spacer sequence
  source 1..20: mol_type = other RNA
tagttgaagtgacaccatta

SEQ ID NO: 636 - RNA, 20 nt, synthetic construct
  misc_feature 1..20: note = spacer sequence
  source 1..20: mol_type = other RNA
tataatttgcataaaagctg

SEQ ID NO: 637 - RNA, 20 nt, synthetic construct
  misc_feature 1..20: note = spacer sequence
  source 1..20: mol_type = other RNA
gcttttatgcaaattataag

SEQ ID NO: 638 - RNA, 20 nt, synthetic construct
  misc_feature 1..20: note = spacer sequence
  source 1..20: mol_type = other RNA
cccaggctggagtgcagtgg

SEQ ID NO: 639 - RNA, 20 nt, synthetic construct
  misc_feature 1..20: note = spacer sequence
  source 1..20: mol_type = other RNA
ccgtgtcgcccaggctggag

SEQ ID NO: 640 - RNA, 20 nt, synthetic construct
  misc_feature 1..20: note = spacer sequence
  source 1..20: mol_type = other RNA
caccgtgtcgcccaggctgg

SEQ ID NO: 641 - RNA, 20 nt, synthetic construct
  misc_feature 1..20: note = spacer sequence
  source 1..20: mol_type = other RNA
gcctcaaaaaaaaaaaaaaa

SEQ ID NO: 642 - RNA, 20 nt, synthetic construct
  misc_feature 1..20: note = spacer sequence
  source 1..20: mol_type = other RNA
aaaaaaaaaaaaaaaaaaaa

SEQ ID NO: 643 - RNA, 20 nt, synthetic construct
  misc_feature 1..20: note = spacer sequence
  source 1..20: mol_type = other RNA
gccttttttttttttttttt

SEQ ID NO: 644 - RNA, 20 nt, synthetic construct
  misc_feature 1..20: note = spacer sequence
  source 1..20: mol_type = other RNA
acctatgcgagatgacaggc

SEQ ID NO: 645 - RNA, 20 nt, synthetic construct
  misc_feature 1..20: note = spacer sequence
  source 1..20: mol_type = other RNA
gtgcacgccattggccacct

SEQ ID NO: 646 - RNA, 20 nt, synthetic construct
  misc_feature 1..20: note = spacer sequence
  source 1..20: mol_type = other RNA
gtctgtgcacgccattggcc

SEQ ID NO: 647 - RNA, 20 nt, synthetic construct
  misc_feature 1..20: note = spacer sequence
  source 1..20: mol_type = other RNA
agttggcgcgcgcgcgcggc

SEQ ID NO: 648 - RNA, 20 nt, synthetic construct
  misc_feature 1..20: note = spacer sequence
  source 1..20: mol_type = other RNA
gcatcggtgggattggtcgg

SEQ ID NO: 649 - RNA, 20 nt, synthetic construct
  misc_feature 1..20: note = spacer sequence
  source 1..20: mol_type = other RNA
gtgggattggtcggaggtaa

SEQ ID NO: 650 - RNA, 20 nt, synthetic construct
  misc_feature 1..20: note = spacer sequence
  source 1..20: mol_type = other RNA
caccgatgccgagccgcgcg

SEQ ID NO: 651 - RNA, 20 nt, synthetic construct
  misc_feature 1..20: note = spacer sequence
  source 1..20: mol_type = other RNA
gaggtaaaggattttcctgc

SEQ ID NO: 652 - RNA, 20 nt, synthetic construct
  misc_feature 1..20: note = spacer sequence
  source 1..20: mol_type = other RNA
gaccaatcccaccgatgccg

SEQ ID NO: 653 - RNA, 20 nt, synthetic construct
  misc_feature 1..20: note = spacer sequence
  source 1..20: mol_type = other RNA
tttacctccgaccaatccca

SEQ ID NO: 654 - RNA, 20 nt, synthetic construct
  misc_feature 1..20: note = spacer sequence
  source 1..20: mol_type = other RNA
tgccacctaaggcggagagg

SEQ ID NO: 655 - RNA, 20 nt, synthetic construct
  misc_feature 1..20: note = spacer sequence
  source 1..20: mol_type = other RNA
gccttaggtggcaggaaaat

SEQ ID NO: 656 - RNA, 20 nt, synthetic construct
  misc_feature 1..20: note = spacer sequence
  source 1..20: mol_type = other RNA
ccgccttaggtggcaggaaa

SEQ ID NO: 657 - RNA, 20 nt, synthetic construct
  misc_feature 1..20: note = spacer sequence
  source 1..20: mol_type = other RNA
tctccgccttaggtggcagg

SEQ ID NO: 658 - RNA, 20 nt, synthetic construct
  misc_feature 1..20: note = spacer sequence
  source 1..20: mol_type = other RNA
cccttcctctccgccttagg

SEQ ID NO: 659 - RNA, 20 nt, synthetic construct
  misc_feature 1..20: note = spacer sequence
  source 1..20: mol_type = other RNA
aaacgggggaggcgaagagt

SEQ ID NO: 660 - RNA, 20 nt, synthetic construct
  misc_feature 1..20: note = spacer sequence
  source 1..20: mol_type = other RNA
atcccccttcctctccgcct

SEQ ID NO: 661 - RNA, 20 nt, synthetic construct
  misc_feature 1..20: note = spacer sequence
  source 1..20: mol_type = other RNA
cccgtttcgatcccccttcc

SEQ ID NO: 662 - RNA, 20 nt, synthetic construct
  misc_feature 1..20: note = spacer sequence
  source 1..20: mol_type = other RNA
cctcccccgtttcgatcccc

SEQ ID NO: 663 - RNA, 20 nt, synthetic construct
  misc_feature 1..20: note = spacer sequence
  source 1..20: mol_type = other RNA
tcgcctcccccgtttcgatc

SEQ ID NO: 664 - RNA, 20 nt, synthetic construct
  misc_feature 1..20: note = spacer sequence
  source 1..20: mol_type = other RNA
aaaaatgttgtgcctgggac

SEQ ID NO: 665 - RNA, 20 nt, synthetic construct
  misc_feature 1..20: note = spacer sequence
  source 1..20: mol_type = other RNA
caggcacaacattttttgac

SEQ ID NO: 666 - RNA, 20 nt, synthetic construct
  misc_feature 1..20: note = spacer sequence
  source 1..20: mol_type = other RNA
ggcgcgggaggcgtgtgcct

SEQ ID NO: 667 - RNA, 20 nt, synthetic construct
  misc_feature 1..20: note = spacer sequence
  source 1..20: mol_type = other RNA
cgcgccagaccacttgtccc

SEQ ID NO: 668 - RNA, 20 nt, synthetic construct
  misc_feature 1..20: note = spacer sequence
  source 1..20: mol_type = other RNA
agggggagacaggaactttt

SEQ ID NO: 669 - RNA, 20 nt, synthetic construct
  misc_feature 1..20: note = spacer sequence
  source 1..20: mol_type = other RNA
ccctagagccaggcacacgc

SEQ ID NO: 670 - RNA, 20 nt, synthetic construct
  misc_feature 1..20: note = spacer sequence
  source 1..20: mol_type = other RNA
ccccctagagccaggcacac

SEQ ID NO: 671 - RNA, 20 nt, synthetic construct
  misc_feature 1..20: note = spacer sequence
  source 1..20: mol_type = other RNA
tgtctccccctagagccagg

SEQ ID NO: 672 - RNA, 20 nt, synthetic construct
  misc_feature 1..20: note = spacer sequence
  source 1..20: mol_type = other RNA
taaaaaagttcctgtctccc

SEQ ID NO: 673 - RNA, 20 nt, synthetic construct
  misc_feature 1..20: note = spacer sequence
  source 1..20: mol_type = other RNA
cgtaaaaaagttcctgtctc

SEQ ID NO: 674 - RNA, 20 nt, synthetic construct
  misc_feature 1..20: note = spacer sequence
  source 1..20: mol_type = other RNA
ctcgtaaaaaagttcctgtc

SEQ ID NO: 675 - RNA, 20 nt, synthetic construct
  misc_feature 1..20: note = spacer sequence
  source 1..20: mol_type = other RNA
taacgcaatcccttcccgtg

SEQ ID NO: 676 - RNA, 20 nt, synthetic construct
  misc_feature 1..20: note = spacer sequence
  source 1..20: mol_type = other RNA
cttcccgtggatgctagagg

SEQ ID NO: 677 - RNA, 20 nt, synthetic construct
  misc_feature 1..20: note = spacer sequence
  source 1..20: mol_type = other RNA
taccacatacagttggtacg

SEQ ID NO: 678 - RNA, 20 nt, synthetic construct
  misc_feature 1..20: note = spacer sequence
  source 1..20: mol_type = other RNA
taccaactgtatgtggtatg

SEQ ID NO: 679 - RNA, 20 nt, synthetic construct
  misc_feature 1..20: note = spacer sequence
  source 1..20: mol_type = other RNA
tcgtaccaactgtatgtggt

SEQ ID NO: 680 - RNA, 20 nt, synthetic construct
  misc_feature 1..20: note = spacer sequence
  source 1..20: mol_type = other RNA
tcctcgtaccaactgtatgt

SEQ ID NO: 681 - RNA, 20 nt, synthetic construct
  misc_feature 1..20: note = spacer sequence
  source 1..20: mol_type = other RNA
ttcatcctcgtaccaactgt

SEQ ID NO: 682 - RNA, 20 nt, synthetic construct
  misc_feature 1..20: note = spacer sequence
  source 1..20: mol_type = other RNA
caaagtgctaggattacagg

SEQ ID NO: 683 - RNA, 20 nt, synthetic construct
  misc_feature 1..20: note = spacer sequence
  source 1..20: mol_type = other RNA
tggcctcccaaagtgctagg

SEQ ID NO: 684 - RNA, 20 nt, synthetic construct
  misc_feature 1..20: note = spacer sequence
  source 1..20: mol_type = other RNA
gcccatcttggcctcccaaa

SEQ ID NO: 685 - RNA, 20 nt, synthetic construct
  misc_feature 1..20: note = spacer sequence
  source 1..20: mol_type = other RNA
ggcaatctgcccatcttggc

SEQ ID NO: 686 - RNA, 20 nt, synthetic construct
  misc_feature 1..20: note = spacer sequence
  source 1..20: mol_type = other RNA
ggagtttgagaccagcctgg

SEQ ID NO: 687 - RNA, 20 nt, synthetic construct
  misc_feature 1..20: note = spacer sequence
  source 1..20: mol_type = other RNA
tgagctcaggcaatctgccc

SEQ ID NO: 688 - RNA, 20 nt, synthetic construct
  misc_feature 1..20: note = spacer sequence
  source 1..20: mol_type = other RNA
aactcctgagctcaggcaat

SEQ ID NO: 689 - RNA, 20 nt, synthetic construct
  misc_feature 1..20: note = spacer sequence
  source 1..20: mol_type = other RNA
caaactcctgagctcaggca

SEQ ID NO: 690 - RNA, 20 nt, synthetic construct
  misc_feature 1..20: note = spacer sequence
  source 1..20: mol_type = other RNA
ccgtgttgcccaggctggtc

SEQ ID NO: 691 - RNA, 20 nt, synthetic construct
  misc_feature 1..20: note = spacer sequence
  source 1..20: mol_type = other RNA
ctactaaaaatacaaaaaat

SEQ ID NO: 692 - RNA, 20 nt, synthetic construct
  misc_feature 1..20: note = spacer sequence
  source 1..20: mol_type = other RNA
actaaaaatacaaaaaatta

SEQ ID NO: 693 - RNA, 20 nt, synthetic construct
  misc_feature 1..20: note = spacer sequence
  source 1..20: mol_type = other RNA
gtggcagaacccagcaccat

SEQ ID NO: 694 - RNA, 20 nt, synthetic construct
  misc_feature 1..20: note = spacer sequence
  source 1..20: mol_type = other RNA
acttcagtggcagaacccag

SEQ ID NO: 695 - RNA, 20 nt, synthetic construct
  misc_feature 1..20: note = spacer sequence
  source 1..20: mol_type = other RNA
gtcaacttcagtggcagaac

SEQ ID NO: 696 - RNA, 20 nt, synthetic construct
  misc_feature 1..20: note = spacer sequence
  source 1..20: mol_type = other RNA
agcctttgggtacctttatt

SEQ ID NO: 697 - RNA, 20 nt, synthetic construct
  misc_feature 1..20: note = spacer sequence
  source 1..20: mol_type = other RNA
cacctgtaatcccagcactc

SEQ ID NO: 698 - RNA, 20 nt, synthetic construct
  misc_feature 1..20: note = spacer sequence
  source 1..20: mol_type = other RNA
ttcttgacctcgcaaaccta

SEQ ID NO: 699 - RNA, 20 nt, synthetic construct
  misc_feature 1..20: note = spacer sequence
  source 1..20: mol_type = other RNA
tgacctcgcaaacctaaaaa

SEQ ID NO: 700 - RNA, 20 nt, synthetic construct
  misc_feature 1..20: note = spacer sequence
  source 1..20: mol_type = other RNA
agaaagatacccaggccagg

SEQ ID NO: 701 - RNA, 20 nt, synthetic construct
  misc_feature 1..20: note = spacer sequence
  source 1..20: mol_type = other RNA
caaacctaaaaagctactgc

SEQ ID NO: 702 - RNA, 20 nt, synthetic construct
  misc_feature 1..20: note = spacer sequence
  source 1..20: mol_type = other RNA
gtgctgtttcttgtctccgc

SEQ ID NO: 703 - RNA, 20 nt, synthetic construct
  misc_feature 1..20: note = spacer sequence
  source 1..20: mol_type = other RNA
ctacttcacactggcaaaga

SEQ ID NO: 704 - RNA, 20 nt, synthetic construct
  misc_feature 1..20: note = spacer sequence
  source 1..20: mol_type = other RNA
cactggcaaagagaatgggg

SEQ ID NO: 705 - RNA, 20 nt, synthetic construct
  misc_feature 1..20: note = spacer sequence
  source 1..20: mol_type = other RNA
ttgccagtgtgaagtagcga

SEQ ID NO: 706 - RNA, 20 nt, synthetic construct
  misc_feature 1..20: note = spacer sequence
  source 1..20: mol_type = other RNA
ctttgccagtgtgaagtagc

SEQ ID NO: 707 - RNA, 20 nt, synthetic construct
  misc_feature 1..20: note = spacer sequence
  source 1..20: mol_type = other RNA
aaatgccccattctctttgc

SEQ ID NO: 708 - RNA, 20 nt, synthetic construct
  misc_feature 1..20: note = spacer sequence
  source 1..20: mol_type = other RNA
gtattttaatcaaaatgccc

SEQ ID NO: 709 - RNA, 20 nt, synthetic construct
  misc_feature 1..20: note = spacer sequence
  source 1..20: mol_type = other RNA
ggccgagtattctgacatct

SEQ ID NO: 710 - RNA, 20 nt, synthetic construct
  misc_feature 1..20: note = spacer sequence
  source 1..20: mol_type = other RNA
gccagatggcatttgtctgt

SEQ ID NO: 711 - RNA, 20 nt, synthetic construct
  misc_feature 1..20: note = spacer sequence
  source 1..20: mol_type = other RNA
gacatcttatctcctgaggg

SEQ ID NO: 712 - RNA, 20 nt, synthetic construct
  misc_feature 1..20: note = spacer sequence
  source 1..20: mol_type = other RNA
gaatactcggccagatggca

SEQ ID NO: 713 - RNA, 20 nt, synthetic construct
  misc_feature 1..20: note = spacer sequence
  source 1..20: mol_type = other RNA
tatctcctgagggcactgtt

SEQ ID NO: 714 - RNA, 20 nt, synthetic construct
  misc_feature 1..20: note = spacer sequence
  source 1..20: mol_type = other RNA
cctgagggcactgttgacat

SEQ ID NO: 715 - RNA, 20 nt, synthetic construct
  misc_feature 1..20: note = spacer sequence
  source 1..20: mol_type = other RNA
tgagggcactgttgacatct

SEQ ID NO: 716 - RNA, 20 nt, synthetic construct
  misc_feature 1..20: note = spacer sequence
  source 1..20: mol_type = other RNA
ggagataagatgtcagaata

SEQ ID NO: 717 - RNA, 20 nt, synthetic construct
  misc_feature 1..20: note = spacer sequence
  source 1..20: mol_type = other RNA
acagtgccctcaggagataa

SEQ ID NO: 718 - RNA, 20 nt, synthetic construct
  misc_feature 1..20: note = spacer sequence
  source 1..20: mol_type = other RNA
aaagagaacatggaattggc

SEQ ID NO: 719 - RNA, 20 nt, synthetic construct
  misc_feature 1..20: note = spacer sequence
  source 1..20: mol_type = other RNA
ttagatgtcaacagtgccct

SEQ ID NO: 720 - RNA, 20 nt, synthetic construct
  misc_feature 1..20: note = spacer sequence
  source 1..20: mol_type = other RNA
ctttagatgtcaacagtgcc

SEQ ID NO: 721 - RNA, 20 nt, synthetic construct
  misc_feature 1..20: note = spacer sequence
  source 1..20: mol_type = other RNA
atgttctctttagatgtcaa

SEQ ID NO: 722 - RNA, 20 nt, synthetic construct
  misc_feature 1..20: note = spacer sequence
  source 1..20: mol_type = other RNA
tttaatgccaattccatgtt

SEQ ID NO: 723 - RNA, 20 nt, synthetic construct
  misc_feature 1..20: note = spacer sequence
  source 1..20: mol_type = other RNA
gcggatcagcagcagtggca

SEQ ID NO: 724 - RNA, 20 nt, synthetic construct
  misc_feature 1..20: note = spacer sequence
  source 1..20: mol_type = other RNA
gcagactacactttgggtag

SEQ ID NO: 725 - RNA, 20 nt, synthetic construct
  misc_feature 1..20: note = spacer sequence
  source 1..20: mol_type = other RNA
gcagcagtggcatcgcctgg

SEQ ID NO: 726 - RNA, 20 nt, synthetic construct
  misc_feature 1..20: note = spacer sequence
  source 1..20: mol_type = other RNA
cctggtgtcagaaacacaat

SEQ ID NO: 727 - RNA, 20 nt, synthetic construct
  misc_feature 1..20: note = spacer sequence
  source 1..20: mol_type = other RNA
gaaacacaatcccagacacc

SEQ ID NO: 728 - RNA, 20 nt, synthetic construct
  misc_feature 1..20: note = spacer sequence
  source 1..20: mol_type = other RNA
gacaccaggcgatgccactg

SEQ ID NO: 729 - RNA, 20 nt, synthetic construct
  misc_feature 1..20: note = spacer sequence
  source 1..20: mol_type = other RNA
cagacaccaagccagacact

SEQ ID NO: 730 - RNA, 20 nt, synthetic construct
  misc_feature 1..20: note = spacer sequence
  source 1..20: mol_type = other RNA
gggattgtgtttctgacacc

SEQ ID NO: 731 - RNA, 20 nt, synthetic construct
  misc_feature 1..20: note = spacer sequence
  source 1..20: mol_type = other RNA
ggcttggtgtctgggattgt

SEQ ID NO: 732 - RNA, 20 nt, synthetic construct
  misc_feature 1..20: note = spacer sequence
  source 1..20: mol_type = other RNA
aatctacgtcttaacactca

SEQ ID NO: 733 - RNA, 20 nt, synthetic construct
  misc_feature 1..20: note = spacer sequence
  source 1..20: mol_type = other RNA
agtgatctgcccacctcggc

SEQ ID NO: 734 - RNA, 20 nt, synthetic construct
  misc_feature 1..20: note = spacer sequence
  source 1..20: mol_type = other RNA
cttgaggccacgagtttgag

SEQ ID NO: 735 - RNA, 20 nt, synthetic construct
  misc_feature 1..20: note = spacer sequence
  source 1..20: mol_type = other RNA
gcccacctcggccccccaaa

SEQ ID NO: 736 - RNA, 20 nt, synthetic construct
  misc_feature 1..20: note = spacer sequence
  source 1..20: mol_type = other RNA
gccccccaaagtgctgggat

SEQ ID NO: 737 - RNA, 20 nt, synthetic construct
  misc_feature 1..20: note = spacer sequence
  source 1..20: mol_type = other RNA
cagcactttggggggccgag

SEQ ID NO: 738 - RNA, 20 nt, synthetic construct
  misc_feature 1..20: note = spacer sequence
  source 1..20: mol_type = other RNA
tcacttctttgaaaatgcaa

SEQ ID NO: 739 - RNA, 20 nt, synthetic construct
  misc_feature 1..20: note = spacer sequence
  source 1..20: mol_type = other RNA
cttctttgaaaatgcaaaac

SEQ ID NO: 740 - RNA, 20 nt, synthetic construct
  misc_feature 1..20: note = spacer sequence
  source 1..20: mol_type = other RNA
tttaccaagcagttgttttt

SEQ ID NO: 741 - RNA, 20 nt, synthetic construct
  misc_feature 1..20: note = spacer sequence
  source 1..20: mol_type = other RNA
aggctttcttacctgaggac

SEQ ID NO: 742 - RNA, 20 nt, synthetic construct
  misc_feature 1..20: note = spacer sequence
  source 1..20: mol_type = other RNA
tacctgaggacagatttttg

SEQ ID NO: 743 - RNA, 20 nt, synthetic construct
  misc_feature 1..20: note = spacer sequence
  source 1..20: mol_type = other RNA
ggtaagaaagccttgattaa

SEQ ID NO: 744 - RNA, 20 nt, synthetic construct
  misc_feature 1..20: note = spacer sequence
  source 1..20: mol_type = other RNA
tcaggtaagaaagccttgat

SEQ ID NO: 745 - RNA, 20 nt, synthetic construct
  misc_feature 1..20: note = spacer sequence
  source 1..20: mol_type = other RNA
gtcctcaggtaagaaagcct

SEQ ID NO: 746 - RNA, 20 nt, synthetic construct
  misc_feature 1..20: note = spacer sequence
  source 1..20: mol_type = other RNA
caaaaatctgtcctcaggta

SEQ ID NO: 747 - RNA, 20 nt, synthetic construct
  misc_feature 1..20: note = spacer sequence
  source 1..20: mol_type = other RNA
ggtgaaaggacctagaaaag

SEQ ID NO: 748 - RNA, 20 nt, synthetic construct
  misc_feature 1..20: note = spacer sequence
  source 1..20: mol_type = other RNA
cccgactcccaaaaatctgt

SEQ ID NO: 749 - RNA, 20 nt, synthetic construct
  misc_feature 1..20: note = spacer sequence
  source 1..20: mol_type = other RNA
tttcacccgactcccaaaaa

SEQ ID NO: 750 - RNA, 20 nt, synthetic construct
  misc_feature 1..20: note = spacer sequence
  source 1..20: mol_type = other RNA
aggtcctttcacccgactcc

SEQ ID NO: 751 - RNA, 20 nt, synthetic construct
  misc_feature 1..20: note = spacer sequence
  source 1..20: mol_type = other RNA
ttgtaatttgctttattgca

SEQ ID NO: 752 - RNA, 20 nt, synthetic construct
  misc_feature 1..20: note = spacer sequence
  source 1..20: mol_type = other RNA
gtgttttcactgaaatggca

SEQ ID NO: 753 - RNA, 20 nt, synthetic construct
  misc_feature 1..20: note = spacer sequence
  source 1..20: mol_type = other RNA
ctgaaatggcagtttatgga

SEQ ID NO: 754 - RNA, 20 nt, synthetic construct
  misc_feature 1..20: note = spacer sequence
  source 1..20: mol_type = other RNA
gtgaaaacacagaaaataaa

SEQ ID NO: 755 - RNA, 20 nt, synthetic construct
  misc_feature 1..20: note = spacer sequence
  source 1..20: mol_type = other RNA
ataaactgccatttcagtga

SEQ ID NO: 756 - RNA, 20 nt, synthetic construct
  misc_feature 1..20: note = spacer sequence
  source 1..20: mol_type = other RNA
ccataaactgccatttcagt

SEQ ID NO: 757 - RNA, 20 nt, synthetic construct
  misc_feature 1..20: note = spacer sequence
  source 1..20: mol_type = other RNA
cccacttggctgtgaacagg

SEQ ID NO: 758 - RNA, 20 nt, synthetic construct
  misc_feature 1..20: note = spacer sequence
  source 1..20: mol_type = other RNA
cacttggctgtgaacaggct

SEQ ID NO: 759 - RNA, 20 nt, synthetic construct
  misc_feature 1..20: note = spacer sequence
  source 1..20: mol_type = other RNA
cagccaagtgggagagtttc

SEQ ID NO: 760 - RNA, 20 nt, synthetic construct
  misc_feature 1..20: note = spacer sequence
  source 1..20: mol_type = other RNA
aagcaacagcaacacttctg

SEQ ID NO: 761 - RNA, 20 nt, synthetic construct
  misc_feature 1..20: note = spacer sequence
  source 1..20: mol_type = other RNA
gcagaattggcagggacagt

SEQ ID NO: 762 - RNA, 20 nt, synthetic construct
  misc_feature 1..20: note = spacer sequence
  source 1..20: mol_type = other RNA
gcagaagtgttgctgttgct

SEQ ID NO: 763 - RNA, 20 nt, synthetic construct
  misc_feature 1..20: note = spacer sequence
  source 1..20: mol_type = other RNA
ctgccaattctgcagaagtg

SEQ ID NO: 764 - RNA, 20 nt, synthetic construct
  misc_feature 1..20: note = spacer sequence
  source 1..20: mol_type = other RNA
atagcactgtccctgccaat

SEQ ID NO: 765 - RNA, 20 nt, synthetic construct
  misc_feature 1..20: note = spacer sequence
  source 1..20: mol_type = other RNA
caaacttcaaggcaaaggga

SEQ ID NO: 766 - RNA, 20 nt, synthetic construct
  misc_feature 1..20: note = spacer sequence
  source 1..20: mol_type = other RNA
aggcaaagggacaaacaaac

SEQ ID NO: 767 - RNA, 20 nt, synthetic construct
  misc_feature 1..20: note = spacer sequence
  source 1..20: mol_type = other RNA
ctttgccttgaagtttgtga

SEQ ID NO: 768 - RNA, 20 nt, synthetic construct
  misc_feature 1..20: note = spacer sequence
  source 1..20: mol_type = other RNA
aaatgtattttcagaggaaa

SEQ ID NO: 769 - RNA, 20 nt, synthetic construct
  misc_feature 1..20: note = spacer sequence
  source 1..20: mol_type = other RNA
ttctgttaggctgggggagc

SEQ ID NO: 770 - RNA, 20 nt, synthetic construct
  misc_feature 1..20: note = spacer sequence
  source 1..20: mol_type = other RNA
atgtcattctgttaggctgg

SEQ ID NO: 771 - RNA, 20 nt, synthetic construct
  misc_feature 1..20: note = spacer sequence
  source 1..20: mol_type = other RNA
agccttttccatgtcattct

SEQ ID NO: 772 - RNA, 20 nt, synthetic construct
  misc_feature 1..20: note = spacer sequence
  source 1..20: mol_type = other RNA
gcaaaacaatccctaggctt

SEQ ID NO: 773 - RNA, 20 nt, synthetic construct
  misc_feature 1..20: note = spacer sequence
  source 1..20: mol_type = other RNA
ctaggcttagagacgctgct

SEQ ID NO: 774 - RNA, 20 nt, synthetic construct
  misc_feature 1..20: note = spacer sequence
  source 1..20: mol_type = other RNA
aagcctagggattgttttgc

SEQ ID NO: 775 - RNA, 20 nt, synthetic construct
  misc_feature 1..20: note = spacer sequence
  source 1..20: mol_type = other RNA
ctaagcctagggattgtttt

SEQ ID NO: 776 - RNA, 20 nt, synthetic construct
  misc_feature 1..20: note = spacer sequence
  source 1..20: mol_type = other RNA
acaggcaagcaaactgggac

SEQ ID NO: 777 - RNA, 20 nt, synthetic construct
  misc_feature 1..20: note = spacer sequence
  source 1..20: mol_type = other RNA
gacctttcttctgtccctta

SEQ ID NO: 778 - RNA, 20 nt, synthetic construct
  misc_feature 1..20: note = spacer sequence
  source 1..20: mol_type = other RNA
gatttagggcagagtctgct

SEQ ID NO: 779 - RNA, 20 nt, synthetic construct
  misc_feature 1..20: note = spacer sequence
  source 1..20: mol_type = other RNA
tctgtcccttaccagctgtg

SEQ ID NO: 780 - RNA, 20 nt, synthetic construct
  misc_feature 1..20: note = spacer sequence
  source 1..20: mol_type = other RNA
gtcccttaccagctgtgtga

SEQ ID NO: 781 - RNA, 20 nt, synthetic construct
  misc_feature 1..20: note = spacer sequence
  source 1..20: mol_type = other RNA
cttaccagctgtgtgacctt

SEQ ID NO: 782 - RNA, 20 nt, synthetic construct
  misc_feature 1..20: note = spacer sequence
  source 1..20: mol_type = other RNA
cacagctggtaagggacaga

SEQ ID NO: 783 - RNA, 20 nt, synthetic construct
  misc_feature 1..20: note = spacer sequence
  source 1..20: mol_type = other RNA
ctgtgcttcattgccctcat

SEQ ID NO: 784 - RNA, 20 nt, synthetic construct
  misc_feature 1..20: note = spacer sequence
  source 1..20: mol_type = other RNA
gtgcttcattgccctcatct

SEQ ID NO: 785 - RNA, 20 nt, synthetic construct
  misc_feature 1..20: note = spacer sequence
  source 1..20: mol_type = other RNA
ttgccctcatctgtaaaatg

SEQ ID NO: 786 - RNA, 20 nt, synthetic construct
  misc_feature 1..20: note = spacer sequence
  source 1..20: mol_type = other RNA
tctgtaaaatgaggcttata

SEQ ID NO: 787 - RNA, 20 nt, synthetic construct
  misc_feature 1..20: note = spacer sequence
  source 1..20: mol_type = other RNA
gtaaaatgaggcttataggc

SEQ ID NO: 788 - RNA, 20 nt, synthetic construct
  misc_feature 1..20: note = spacer sequence
  source 1..20: mol_type = other RNA
ttttacagatgagggcaatg

SEQ ID NO: 789 - RNA, 20 nt, synthetic construct
  misc_feature 1..20: note = spacer sequence
  source 1..20: mol_type = other RNA
gtgggatttgtttattcttg

SEQ ID NO: 790 - RNA, 20 nt, synthetic construct
  misc_feature 1..20: note = spacer sequence
  source 1..20: mol_type = other RNA
cttcttccatttttcagaca

SEQ ID NO: 791 - RNA, 20 nt, synthetic construct
  misc_feature 1..20: note = spacer sequence
  source 1..20: mol_type = other RNA
tcttccatttttcagacagg

SEQ ID NO: 792 - RNA, 20 nt, synthetic construct
  misc_feature 1..20: note = spacer sequence
  source 1..20: mol_type = other RNA
tccatttttcagacaggcag

SEQ ID NO: 793 - RNA, 20 nt, synthetic construct
  misc_feature 1..20: note = spacer sequence
  source 1..20: mol_type = other RNA
atttttcagacaggcagttc

SEQ ID NO: 794 - RNA, 20 nt, synthetic construct
  misc_feature 1..20: note = spacer sequence
  source 1..20: mol_type = other RNA
gacaggcagttcttagcctt

SEQ ID NO: 795 - RNA, 20 nt, synthetic construct
  misc_feature 1..20: note = spacer sequence
  source 1..20: mol_type = other RNA
gaaaaatggaagaagagatc

SEQ ID NO: 796 - RNA, 20 nt, synthetic construct
  misc_feature 1..20: note = spacer sequence
  source 1..20: mol_type = other RNA
tagccttaccatctaatgga

SEQ ID NO: 797 - RNA, 20 nt, synthetic construct
  misc_feature 1..20: note = spacer sequence
  source 1..20: mol_type = other RNA
aatggaggtactgcccaggc

SEQ ID NO: 798 - RNA, 20 nt, synthetic construct
  misc_feature 1..20: note = spacer sequence
  source 1..20: mol_type = other RNA
attagatggtaaggctaaga

SEQ ID NO: 799 - RNA, 20 nt, synthetic construct
  misc_feature 1..20: note = spacer sequence
  source 1..20: mol_type = other RNA
agcctgggcagtacctccat

SEQ ID NO: 800 - RNA, 20 nt, synthetic construct
  misc_feature 1..20: note = spacer sequence
  source 1..20: mol_type = other RNA
tccagcctgggcagtacctc

SEQ ID NO: 801 - RNA, 20 nt, synthetic construct
  misc_feature 1..20: note = spacer sequence
  source 1..20: mol_type = other RNA
ccaaatacagccatattatg

SEQ ID NO: 802 - RNA, 20 nt, synthetic construct
  misc_feature 1..20: note = spacer sequence
  source 1..20: mol_type = other RNA
aaatacagccatattatgag

SEQ ID NO: 803 - RNA, 20 nt, synthetic construct
  misc_feature 1..20: note = spacer sequence
  source 1..20: mol_type = other RNA
taatatggctgtatttggag

SEQ ID NO: 804 - RNA, 20 nt, synthetic construct
  misc_feature 1..20: note = spacer sequence
  source 1..20: mol_type = other RNA
tcataatatggctgtatttg

SEQ ID NO: 805 - RNA, 20 nt, synthetic construct
  misc_feature 1..20: note = spacer sequence
  source 1..20: mol_type = other RNA
acggatgaattttgaagggg

SEQ ID NO: 806 - RNA, 20 nt, synthetic construct
  misc_feature 1..20: note = spacer sequence
  source 1..20: mol_type = other RNA
gttgaagccctaacccccag

SEQ ID NO: 807 - RNA, 20 nt, synthetic construct
  misc_feature 1..20: note = spacer sequence
  source 1..20: mol_type = other RNA
tccgttgaagccctaacccc

SEQ ID NO: 808 - RNA, 20 nt, synthetic construct
  misc_feature 1..20: note = spacer sequence
  source 1..20: mol_type = other RNA
aaattcatccgttgaagccc

SEQ ID NO: 809 - RNA, 20 nt, synthetic construct
  misc_feature 1..20: note = spacer sequence
  source 1..20: mol_type = other RNA
agccataacaagtacccaac

SEQ ID NO: 810 - RNA, 20 nt, synthetic construct
  misc_feature 1..20: note = spacer sequence
  source 1..20: mol_type = other RNA
tctatatgctgtaaagaata

SEQ ID NO: 811 - RNA, 20 nt, synthetic construct
  misc_feature 1..20: note = spacer sequence
  source 1..20: mol_type = other RNA
atatgctgtaaagaataagc

SEQ ID NO: 812 - RNA, 20 nt, synthetic construct
  misc_feature 1..20: note = spacer sequence
  source 1..20: mol_type = other RNA
gcatgtaagttaatttttcc

SEQ ID NO: 813 - RNA, 20 nt, synthetic construct
  misc_feature 1..20: note = spacer sequence
  source 1..20: mol_type = other RNA
ccgtctaaaacaagtgctgc

SEQ ID NO: 814 - RNA, 20 nt, synthetic construct
  misc_feature 1..20: note = spacer sequence
  source 1..20: mol_type = other RNA
aaaacaagtgctgcttttat

SEQ ID NO: 815 - RNA, 20 nt, synthetic construct
  misc_feature 1..20: note = spacer sequence
  source 1..20: mol_type = other RNA
tctcaaaactcatggtatgt

SEQ ID NO: 816 - RNA, 20 nt, synthetic construct
  misc_feature 1..20: note = spacer sequence
  source 1..20: mol_type = other RNA
caaaactcatggtatgtaag

SEQ ID NO: 817 - RNA, 20 nt, synthetic construct
  misc_feature 1..20: note = spacer sequence
  source 1..20: mol_type = other RNA
aaactcatggtatgtaagaa

SEQ ID NO: 818 - RNA, 20 nt, synthetic construct
  misc_feature 1..20: note = spacer sequence
  source 1..20: mol_type = other RNA
tggtatgtaagaagcaacat

SEQ ID NO: 819 - RNA, 20 nt, synthetic construct
  misc_feature 1..20: note = spacer sequence
  source 1..20: mol_type = other RNA
tacataccatgagttttgag

SEQ ID NO: 820 - RNA, 20 nt, synthetic construct
  misc_feature 1..20: note = spacer sequence
  source 1..20: mol_type = other RNA
gtcgaaaaaaaaaagtgttt

SEQ ID NO: 821 - RNA, 20 nt, synthetic construct
  misc_feature 1..20: note = spacer sequence
  source 1..20: mol_type = other RNA
aaaaaaaaaagtgtttcatg

SEQ ID NO: 822 - RNA, 20 nt, synthetic construct
  misc_feature 1..20: note = spacer sequence
  source 1..20: mol_type = other RNA
acagaaaggattattttggg

SEQ ID NO: 823 - RNA, 20 nt, synthetic construct
  misc_feature 1..20: note = spacer sequence
  source 1..20: mol_type = other RNA
tgtaataaacactggttcta

SEQ ID NO: 824 - RNA, 20 nt, synthetic construct
  misc_feature 1..20: note = spacer sequence
  source 1..20: mol_type = other RNA
aatcctaagagaaaatatat

SEQ ID NO: 825 - RNA, 20 nt, synthetic construct
  misc_feature 1..20: note = spacer sequence
  source 1..20: mol_type = other RNA
taagagaaaatatatagaaa

SEQ ID NO: 826 - RNA, 20 nt, synthetic construct
  misc_feature 1..20: note = spacer sequence
  source 1..20: mol_type = other RNA
taggattagaaccagtgttt

SEQ ID NO: 827 - RNA, 20 nt, synthetic construct
  misc_feature 1..20: note = spacer sequence
  source 1..20: mol_type = other RNA
cttaggattagaaccagtgt

SEQ ID NO: 828 - RNA, 20 nt, synthetic construct
  misc_feature 1..20: note = spacer sequence
  source 1..20: mol_type = other RNA
atatattttctcttaggatt

SEQ ID NO: 829 - RNA, 20 nt, synthetic construct
  misc_feature 1..20: note = spacer sequence
  source 1..20: mol_type = other RNA
ccattgtttttaatgtcaac

SEQ ID NO: 830 - RNA, 20 nt, synthetic construct
  misc_feature 1..20: note = spacer sequence
  source 1..20: mol_type = other RNA
attgtttttaatgtcaacaa

SEQ ID NO: 831 - RNA, 20 nt, synthetic construct
  misc_feature 1..20: note = spacer sequence
  source 1..20: mol_type = other RNA
acaaatcagacaacctttta

SEQ ID NO: 832 - RNA, 20 nt, synthetic construct
  misc_feature 1..20: note = spacer sequence
  source 1..20: mol_type = other RNA
gacaaccttttagtcaacca

SEQ ID NO: 833 - RNA, 20 nt, synthetic construct
  misc_feature 1..20: note = spacer sequence
  source 1..20: mol_type = other RNA
gatttgttgacattaaaaac

SEQ ID NO: 834 - RNA, 20 nt, synthetic construct
  misc_feature 1..20: note = spacer sequence
  source 1..20: mol_type = other RNA
accaaaaacaatctctcaat

SEQ ID NO: 835 - RNA, 20 nt, synthetic construct
  misc_feature 1..20: note = spacer sequence
  source 1..20: mol_type = other RNA
ctcaattacacatacctaga

SEQ ID NO: 836 - RNA, 20 nt, synthetic construct
  misc_feature 1..20: note = spacer sequence
  source 1..20: mol_type = other RNA
caattacacatacctagata

SEQ ID NO: 837 - RNA, 20 nt, synthetic construct
  misc_feature 1..20: note = spacer sequence
  source 1..20: mol_type = other RNA
attacacatacctagatatg

SEQ ID NO: 838 - RNA, 20 nt, synthetic construct
  misc_feature 1..20: note = spacer sequence
  source 1..20: mol_type = other RNA
aggtatgtgtaattgagaga

SEQ ID NO: 839 - RNA, 20 nt, synthetic construct
  misc_feature 1..20: note = spacer sequence
  source 1..20: mol_type = other RNA
ctacatatctaggtatgtgt

SEQ ID NO: 840 - RNA, 20 nt, synthetic construct
  misc_feature 1..20: note = spacer sequence
  source 1..20: mol_type = other RNA
tattcactacatatctaggt

SEQ ID NO: 841 - RNA, 20 nt, synthetic construct
  misc_feature 1..20: note = spacer sequence
  source 1..20: mol_type = other RNA
aattcatattcactacatat

SEQ ID NO: 842 - RNA, 20 nt, synthetic construct
  misc_feature 1..20: note = spacer sequence
  source 1..20: mol_type = other RNA
ttttcaaattcatattcact

SEQ ID NO: 843 - RNA, 20 nt, synthetic construct
  misc_feature 1..20: note = spacer sequence
  source 1..20: mol_type = other RNA
tcattttcaaattcatattc

SEQ ID NO: 844 - RNA, 20 nt, synthetic construct
  misc_feature 1..20: note = spacer sequence
  source 1..20: mol_type = other RNA
cctcattttcaaattcatat

SEQ ID NO: 845 - RNA, 20 nt, synthetic construct
  misc_feature 1..20: note = spacer sequence
  source 1..20: mol_type = other RNA
aatgcaatataccccatcca

SEQ ID NO: 846 - RNA, 20 nt, synthetic construct
  misc_feature 1..20: note = spacer sequence
  source 1..20: mol_type = other RNA
agcacagccactgtgtaact

SEQ ID NO: 847 - RNA, 20 nt, synthetic construct
  misc_feature 1..20: note = spacer sequence
  source 1..20: mol_type = other RNA
ttacaaatgtttaccagcgc

SEQ ID NO: 848 - RNA, 20 nt, synthetic construct
  misc_feature 1..20: note = spacer sequence
  source 1..20: mol_type = other RNA
gtgacatttgtgacatttta

SEQ ID NO: 849 - RNA, 20 nt, synthetic construct
  misc_feature 1..20: note = spacer sequence
  source 1..20: mol_type = other RNA
ctgaagttggtttctttaca

SEQ ID NO: 850 - RNA, 20 nt, synthetic construct
  misc_feature 1..20: note = spacer sequence
  source 1..20: mol_type = other RNA
caaatgtcactgaagttggt

SEQ ID NO: 851 - RNA, 20 nt, synthetic construct
  misc_feature 1..20: note = spacer sequence
  source 1..20: mol_type = other RNA
ttaaaatgtcacaaatgtca

SEQ ID NO: 852 - RNA, 20 nt, synthetic construct
  misc_feature 1..20: note = spacer sequence
  source 1..20: mol_type = other RNA
aattactctttaaaatgtca

SEQ ID NO: 853 - RNA, 20 nt, synthetic construct
  misc_feature 1..20: note = spacer sequence
  source 1..20: mol_type = other RNA
taacaaacatccaattactc

SEQ ID NO: 854 - RNA, 20 nt, synthetic construct
  misc_feature 1..20: note = spacer sequence
  source 1..20: mol_type = other RNA
gagtctttaatatgaaccaa

SEQ ID NO: 855 - RNA, 20 nt, synthetic construct
  misc_feature 1..20: note = spacer sequence
  source 1..20: mol_type = other RNA
gattcataacaaacatccaa

SEQ ID NO: 856 - RNA, 20 nt, synthetic construct
  misc_feature 1..20: note = spacer sequence
  source 1..20: mol_type = other RNA
ttaatatgaaccaaccataa

SEQ ID NO: 857 - RNA, 20 nt, synthetic construct
  misc_feature 1..20: note = spacer sequence
  source 1..20: mol_type = other RNA
tattaaagactcagattcat

SEQ ID NO: 858 - RNA, 20 nt, synthetic construct
  misc_feature 1..20: note = spacer sequence
  source 1..20: mol_type = other RNA
tatggttggttcatattaaa

SEQ ID NO: 859 - RNA, 20 nt, synthetic construct
  misc_feature 1..20: note = spacer sequence
  source 1..20: mol_type = other RNA
gtttaaaatcattactcttt

SEQ ID NO: 860 - RNA, 20 nt, synthetic construct
  misc_feature 1..20: note = spacer sequence
  source 1..20: mol_type = other RNA
ttactctttttgctagagag

SEQ ID NO: 861 - RNA, 20 nt, synthetic construct
  misc_feature 1..20: note = spacer sequence
  source 1..20: mol_type = other RNA
ttttgctagagagcactata

SEQ ID NO: 862 - RNA, 20 nt, synthetic construct
  misc_feature 1..20: note = spacer sequence
  source 1..20: mol_type = other RNA
agcaaaaagagtaatgattt

SEQ ID NO: 863 - RNA, 20 nt, synthetic construct
  misc_feature 1..20: note = spacer sequence
  source 1..20: mol_type = other RNA
ctagcaaaaagagtaatgat

SEQ ID NO: 864 - RNA, 20 nt, synthetic construct
  misc_feature 1..20: note = spacer sequence
  source 1..20: mol_type = other RNA
gcaaacccaagccattcaag

SEQ ID NO: 865 - RNA, 20 nt, synthetic construct
  misc_feature 1..20: note = spacer sequence
  source 1..20: mol_type = other RNA
agtttcacaaataggtgttt

SEQ ID NO: 866 - RNA, 20 nt, synthetic construct
  misc_feature 1..20: note = spacer sequence
  source 1..20: mol_type = other RNA
ctctcctcttttccgtaaga

SEQ ID NO: 867 - RNA, 20 nt, synthetic construct
  misc_feature 1..20: note = spacer sequence
  source 1..20: mol_type = other RNA
ctcctcttttccgtaagagt

SEQ ID NO: 868 - RNA, 20 nt, synthetic construct
  misc_feature 1..20: note = spacer sequence
  source 1..20: mol_type = other RNA
cctcttttccgtaagagttg

SEQ ID NO: 869 - RNA, 20 nt, synthetic construct
  misc_feature 1..20: note = spacer sequence
  source 1..20: mol_type = other RNA
tcttttccgtaagagttgtg

SEQ ID NO: 870 - RNA, 20 nt, synthetic construct
  misc_feature 1..20: note = spacer sequence
  source 1..20: mol_type = other RNA
tttccgtaagagttgtggca

SEQ ID NO: 871 - RNA, 20 nt, synthetic construct
  misc_feature 1..20: note = spacer sequence
  source 1..20: mol_type = other RNA
gtaagagttgtggcagccat

SEQ ID NO: 872 - RNA, 20 nt, synthetic construct
  misc_feature 1..20: note = spacer sequence
  source 1..20: mol_type = other RNA
tacggaaaagaggagagaga

SEQ ID NO: 873 - RNA, 20 nt, synthetic construct
  misc_feature 1..20: note = spacer sequence
  source 1..20: mol_type = other RNA
tgaagttctgaagtgaaaat

SEQ ID NO: 874 - RNA, 20 nt, synthetic construct
  misc_feature 1..20: note = spacer sequence
  source 1..20: mol_type = other RNA
tgatggctgccacaactctt

SEQ ID NO: 875 - RNA, 20 nt, synthetic construct
  misc_feature 1..20: note = spacer sequence
  source 1..20: mol_type = other RNA
gaagtgaaaatccaactaac

SEQ ID NO: 876 - RNA, 20 nt, synthetic construct
  misc_feature 1..20: note = spacer sequence
  source 1..20: mol_type = other RNA
gaacttcatgatggctgcca

SEQ ID NO: 877 - RNA, 20 nt, synthetic construct
  misc_feature 1..20: note = spacer sequence
  source 1..20: mol_type = other RNA
cttcagaacttcatgatggc

SEQ ID NO: 878 - RNA, 20 nt, synthetic construct
  misc_feature 1..20: note = spacer sequence
  source 1..20: mol_type = other RNA
aactaaccaggaataaagtg

SEQ ID NO: 879 - RNA, 20 nt, synthetic construct
  misc_feature 1..20: note = spacer sequence
  source 1..20: mol_type = other RNA
tggttagttggattttcact

SEQ ID NO: 880 - RNA, 20 nt, synthetic construct
  misc_feature 1..20: note = spacer sequence
  source 1..20: mol_type = other RNA
ctttattcctggttagttgg

SEQ ID NO: 881 - RNA, 20 nt, synthetic construct
  misc_feature 1..20: note = spacer sequence
  source 1..20: mol_type = other RNA
ttttcactttattcctggtt

SEQ ID NO: 882 - RNA, 20 nt, synthetic construct
  misc_feature 1..20: note = spacer sequence
  source 1..20: mol_type = other RNA
ctttttcactttattcctgg

SEQ ID NO: 883 - RNA, 20 nt, synthetic construct
  misc_feature 1..20: note = spacer sequence
  source 1..20: mol_type = other RNA
catatccatactctcttttt

SEQ ID NO: 884 - RNA, 20 nt, synthetic construct
  misc_feature 1..20: note = spacer sequence
  source 1..20: mol_type = other RNA
attaccagactatctctgga

SEQ ID NO: 885 - RNA, 20 nt, synthetic construct
  misc_feature 1..20: note = spacer sequence
  source 1..20: mol_type = other RNA
accatgttatcccatatcca

SEQ ID NO: 886 - RNA, 20 nt, synthetic construct
  misc_feature 1..20: note = spacer sequence
  source 1..20: mol_type = other RNA
ggtaatcgaccatgttatcc

SEQ ID NO: 887 - RNA, 20 nt, synthetic construct
  misc_feature 1..20: note = spacer sequence
  source 1..20: mol_type = other RNA
ctggaaatgtttacttccac

SEQ ID NO: 888 - RNA, 20 nt, synthetic construct
  misc_feature 1..20: note = spacer sequence
  source 1..20: mol_type = other RNA
ggaaatgtttacttccaccc

SEQ ID NO: 889 - RNA, 20 nt, synthetic construct
  misc_feature 1..20: note = spacer sequence
  source 1..20: mol_type = other RNA
agagatagtctggtaatcga

SEQ ID NO: 890 - RNA, 20 nt, synthetic construct
  misc_feature 1..20: note = spacer sequence
  source 1..20: mol_type = other RNA
accctttttactgagagaga

SEQ ID NO: 891 - RNA, 20 nt, synthetic construct
  misc_feature 1..20: note = spacer sequence
  source 1..20: mol_type = other RNA
gtaaaaagggtggaagtaaa

SEQ ID NO: 892 - RNA, 20 nt, synthetic construct
  misc_feature 1..20: note = spacer sequence
  source 1..20: mol_type = other RNA
cagtaaaaagggtggaagta

SEQ ID NO: 893 - RNA, 20 nt, synthetic construct
  misc_feature 1..20: note = spacer sequence
  source 1..20: mol_type = other RNA
ctcagtaaaaagggtggaag

SEQ ID NO: 894 - RNA, 20 nt, synthetic construct
  misc_feature 1..20: note = spacer sequence
  source 1..20: mol_type = other RNA
ctctcagtaaaaagggtgga

SEQ ID NO: 895 - RNA, 20 nt, synthetic construct
  misc_feature 1..20: note = spacer sequence
  source 1..20: mol_type = other RNA
tctctctcagtaaaaagggt

SEQ ID NO: 896 - RNA, 20 nt, synthetic construct
  misc_feature 1..20: note = spacer sequence
  source 1..20: mol_type = other RNA
ctaagctggttttaattata

SEQ ID NO: 897 - RNA, 20 nt, synthetic construct
  misc_feature 1..20: note = spacer sequence
  source 1..20: mol_type = other RNA
aagctggttttaattatatt

SEQ ID NO: 898 - RNA, 20 nt, synthetic construct
  misc_feature 1..20: note = spacer sequence
  source 1..20: mol_type = other RNA
cccaaactctttatcaatta

SEQ ID NO: 899 - RNA, 20 nt, synthetic construct
  misc_feature 1..20: note = spacer sequence
  source 1..20: mol_type = other RNA
atttaaaataacaaaaaata

SEQ ID NO: 900 - RNA, 20 nt, synthetic construct
  misc_feature 1..20: note = spacer sequence
  source 1..20: mol_type = other RNA
tattttttgttattttaaat

SEQ ID NO: 901 - RNA, 20 nt, synthetic construct
  misc_feature 1..20: note = spacer sequence
  source 1..20: mol_type = other RNA
cttattttttgttattttaa

SEQ ID NO: 902 - RNA, 20 nt, synthetic construct
  misc_feature 1..20: note = spacer sequence
  source 1..20: mol_type = other RNA
gccaggcatggtggttcaca

SEQ ID NO: 903 - RNA, 20 nt, synthetic construct
  misc_feature 1..20: note = spacer sequence
  source 1..20: mol_type = other RNA
cacctataatcctagcactt

SEQ ID NO: 904 - RNA, 20 nt, synthetic construct
  misc_feature 1..20: note = spacer sequence
  source 1..20: mol_type = other RNA
ttttttttttttttttttta

SEQ ID NO: 905 - RNA, 20 nt, synthetic construct
  misc_feature 1..20: note = spacer sequence
  source 1..20: mol_type = other RNA
cttttttttttttttttttt

SEQ ID NO: 906 - RNA, 20 nt, synthetic construct
  misc_feature 1..20: note = spacer sequence
  source 1..20: mol_type = other RNA
ctcttttttttttttttttt

SEQ ID NO: 907 - RNA, 20 nt, synthetic construct
  misc_feature 1..20: note = spacer sequence
  source 1..20: mol_type = other RNA
ctctcttttttttttttttt

SEQ ID NO: 908 - RNA, 20 nt, synthetic construct
  misc_feature 1..20: note = spacer sequence
  source 1..20: mol_type = other RNA
ctacaatttagaaaaagctt

SEQ ID NO: 909 - RNA, 20 nt, synthetic construct
  misc_feature 1..20: note = spacer sequence
  source 1..20: mol_type = other RNA
aaattgtagggaattctctc

SEQ ID NO: 910 - RNA, 20 nt, synthetic construct
  misc_feature 1..20: note = spacer sequence
  source 1..20: mol_type = other RNA
tgtgttaataataatatctt

SEQ ID NO: 911 - RNA, 20 nt, synthetic construct
  misc_feature 1..20: note = spacer sequence
  source 1..20: mol_type = other RNA
tcaggccaggctcagtggtt

SEQ ID NO: 912 - RNA, 20 nt, synthetic construct
  misc_feature 1..20: note = spacer sequence
  source 1..20: mol_type = other RNA
ggccaggctcagtggttcac

SEQ ID NO: 913 - RNA, 20 nt, synthetic construct
  misc_feature 1..20: note = spacer sequence
  source 1..20: mol_type = other RNA
acccgcctcggcctcctgaa

SEQ ID NO: 914 - RNA, 20 nt, synthetic construct
  misc_feature 1..20: note = spacer sequence
  source 1..20: mol_type = other RNA
agagttcaagaccagcctgg

SEQ ID NO: 915 - RNA, 20 nt, synthetic construct
  misc_feature 1..20: note = spacer sequence
  source 1..20: mol_type = other RNA
tgagcttaaggcatctaccc

SEQ ID NO: 916 - RNA, 20 nt, synthetic construct
  misc_feature 1..20: note = spacer sequence
  source 1..20: mol_type = other RNA
agaccagcctgggcaagatg

SEQ ID NO: 917 - RNA, 20 nt, synthetic construct
  misc_feature 1..20: note = spacer sequence
  source 1..20: mol_type = other RNA
tgaactcttgagcttaaggc

SEQ ID NO: 918 - RNA, 20 nt, synthetic construct
  misc_feature 1..20: note = spacer sequence
  source 1..20: mol_type = other RNA
tgcccaggctggtcttgaac

SEQ ID NO: 919 - RNA, 20 nt, synthetic construct
  misc_feature 1..20: note = spacer sequence
  source 1..20: mol_type = other RNA
atctctacaaaaaattagcc

SEQ ID NO: 920 - RNA, 20 nt, synthetic construct
  misc_feature 1..20: note = spacer sequence
  source 1..20: mol_type = other RNA
ctacaaaaaattagccgcag

SEQ ID NO: 921 - RNA, 20 nt, synthetic construct
  misc_feature 1..20: note = spacer sequence
  source 1..20: mol_type = other RNA
acaaaaaattagccgcaggt

SEQ ID NO: 922 - RNA, 20 nt, synthetic construct
  misc_feature 1..20: note = spacer sequence
  source 1..20: mol_type = other RNA
cgaactcccgaccttgtgat

SEQ ID NO: 923 - RNA, 20 nt, synthetic construct
  misc_feature 1..20: note = spacer sequence
  source 1..20: mol_type = other RNA
aactcccgaccttgtgatcc

SEQ ID NO: 924 - RNA, 20 nt, synthetic construct
  misc_feature 1..20: note = spacer sequence
  source 1..20: mol_type = other RNA
agaccagcctggccaatatg

SEQ ID NO: 925 - RNA, 20 nt, synthetic construct
  misc_feature 1..20: note = spacer sequence
  source 1..20: mol_type = other RNA
cgaccttgtgatccgcctgc

SEQ ID NO: 926 - RNA, 20 nt, synthetic construct
  misc_feature 1..20: note = spacer sequence
  source 1..20: mol_type = other RNA
ggagttcgagaccagcctgg

SEQ ID NO: 927 - RNA, 20 nt, synthetic construct
  misc_feature 1..20: note = spacer sequence
  source 1..20: mol_type = other RNA
caaggtcgggagttcgagac

SEQ ID NO: 928 - RNA, 20 nt, synthetic construct
  misc_feature 1..20: note = spacer sequence
  source 1..20: mol_type = other RNA
gcctgcctcagcctcccaaa

SEQ ID NO: 929 - RNA, 20 nt, synthetic construct
  misc_feature 1..20: note = spacer sequence
  source 1..20: mol_type = other RNA
gcctcccaaagtgctgggat

SEQ ID NO: 930 - RNA, 20 nt, synthetic construct
  misc_feature 1..20: note = spacer sequence
  source 1..20: mol_type = other RNA
caaagtgctgggattacagg

SEQ ID NO: 931 - RNA, 20 nt, synthetic construct
  misc_feature 1..20: note = spacer sequence
  source 1..20: mol_type = other RNA
cagcactttgggaggctgag

SEQ ID NO: 932 - RNA, 20 nt, synthetic construct
  misc_feature 1..20: note = spacer sequence
  source 1..20: mol_type = other RNA
tgcctgtaatcccagcactt

SEQ ID NO: 933 - RNA, 20 nt, synthetic construct
  misc_feature 1..20: note = spacer sequence
  source 1..20: mol_type = other RNA
taaattttcctggcgcgcaa

SEQ ID NO: 934 - RNA, 20 nt, synthetic construct
  misc_feature 1..20: note = spacer sequence
  source 1..20: mol_type = other RNA
gtgtcctaaattttcctggc

SEQ ID NO: 935 - RNA, 20 nt, synthetic construct
  misc_feature 1..20: note = spacer sequence
  source 1..20: mol_type = other RNA
ttgtgtgtgtctgtgtccta

SEQ ID NO: 936 - RNA, 20 nt, synthetic construct
  misc_feature 1..20: note = spacer sequence
  source 1..20: mol_type = other RNA
taaactccttgtgtgtgtct

SEQ ID NO: 937 - RNA, 20 nt, synthetic construct
  misc_feature 1..20: note = spacer sequence
  source 1..20: mol_type = other RNA
gctcctaaactccttgtgtg

SEQ ID NO: 938 - RNA, 20 nt, synthetic construct
  misc_feature 1..20: note = spacer sequence
  source 1..20: mol_type = other RNA
acctattaaacctccgctcc

SEQ ID NO: 939 - RNA, 20 nt, synthetic construct
  misc_feature 1..20: note = spacer sequence
  source 1..20: mol_type = other RNA
tctacctattaaacctccgc

SEQ ID NO: 940 - RNA, 20 nt, synthetic construct
  misc_feature 1..20: note = spacer sequence
  source 1..20: mol_type = other RNA
cttctacctattaaacctcc

SEQ ID NO: 941 - RNA, 20 nt, synthetic construct
  misc_feature 1..20: note = spacer sequence
  source 1..20: mol_type = other RNA
tctcttctacctattaaacc

SEQ ID NO: 942 - RNA, 20 nt, synthetic construct
  misc_feature 1..20: note = spacer sequence
  source 1..20: mol_type = other RNA
ttttcttctcttctacctat

SEQ ID NO: 943 - RNA, 20 nt, synthetic construct
  misc_feature 1..20: note = spacer sequence
  source 1..20: mol_type = other RNA
ctttttcttctcttctacct

SEQ ID NO: 944 - RNA, 20 nt, synthetic construct
  misc_feature 1..20: note = spacer sequence
  source 1..20: mol_type = other RNA
ctccatagaggaaagggcct

SEQ ID NO: 945 - RNA, 20 nt, synthetic construct
  misc_feature 1..20: note = spacer sequence
  source 1..20: mol_type = other RNA
atagaggaaagggcctctga

SEQ ID NO: 946 - RNA, 20 nt, synthetic construct
  misc_feature 1..20: note = spacer sequence
  source 1..20: mol_type = other RNA
atggagggagctgtttctct

SEQ ID NO: 947 - RNA, 20 nt, synthetic construct
  misc_feature 1..20: note = spacer sequence
  source 1..20: mol_type = other RNA
tctatggagggagctgtttc

SEQ ID NO: 948 - RNA, 20 nt, synthetic construct
  misc_feature 1..20: note = spacer sequence
  source 1..20: mol_type = other RNA
gagcagaaaggactgagcag

SEQ ID NO: 949 - RNA, 20 nt, synthetic construct
  misc_feature 1..20: note = spacer sequence
  source 1..20: mol_type = other RNA
gaggccctttcctctatgga

SEQ ID NO: 950 - RNA, 20 nt, synthetic construct
  misc_feature 1..20: note = spacer sequence
  source 1..20: mol_type = other RNA
gctcagaggccctttcctct

SEQ ID NO: 951 - RNA, 20 nt, synthetic construct
  misc_feature 1..20: note = spacer sequence
  source 1..20: mol_type = other RNA
tttctgctcagaggcccttt

SEQ ID NO: 952 - RNA, 20 nt, synthetic construct
  misc_feature 1..20: note = spacer sequence
  source 1..20: mol_type = other RNA
gtcctttctgctcagaggcc

SEQ ID NO: 953 - RNA, 20 nt, synthetic construct
  misc_feature 1..20: note = spacer sequence
  source 1..20: mol_type = other RNA
ccatattaataccccatata

SEQ ID NO: 954 - RNA, 20 nt, synthetic construct
  misc_feature 1..20: note = spacer sequence
  source 1..20: mol_type = other RNA
atattaataccccatataac

SEQ ID NO: 955 - RNA, 20 nt, synthetic construct
  misc_feature 1..20: note = spacer sequence
  source 1..20: mol_type = other RNA
agcattttgcaaaatgggtt

SEQ ID NO: 956 - RNA, 20 nt, synthetic construct
  misc_feature 1..20: note = spacer sequence
  source 1..20: mol_type = other RNA
atggtcttgaggtccctgga

SEQ ID NO: 957 - RNA, 20 nt, synthetic construct
  misc_feature 1..20: note = spacer sequence
  source 1..20: mol_type = other RNA
acttcaagcattttgcaaaa

SEQ ID NO: 958 - RNA, 20 nt, synthetic construct
  misc_feature 1..20: note = spacer sequence
  source 1..20: mol_type = other RNA
tgaggtccctggagctagaa

SEQ ID NO: 959 - RNA, 20 nt, synthetic construct
  misc_feature 1..20: note = spacer sequence
  source 1..20: mol_type = other RNA
agaccatcgacttcaagcat

SEQ ID NO: 960 - RNA, 20 nt, synthetic construct
  misc_feature 1..20: note = spacer sequence
  source 1..20: mol_type = other RNA
ctggagctagaaaaggcatt

SEQ ID NO: 961 - RNA, 20 nt, synthetic construct
  misc_feature 1..20: note = spacer sequence
  source 1..20: mol_type = other RNA
agggacctcaagaccatcga

SEQ ID NO: 962 - RNA, 20 nt, synthetic construct
  misc_feature 1..20: note = spacer sequence
  source 1..20: mol_type = other RNA
caaatctgctcttcttggcc

SEQ ID NO: 963 - RNA, 20 nt, synthetic construct
  misc_feature 1..20: note = spacer sequence
  source 1..20: mol_type = other RNA
gctcttcttggccttgatga

SEQ ID NO: 964 - RNA, 20 nt, synthetic construct
  misc_feature 1..20: note = spacer sequence
  source 1..20: mol_type = other RNA
tcttggccttgatgatgaca

SEQ ID NO: 965 - RNA, 20 nt, synthetic construct
  misc_feature 1..20: note = spacer sequence
  source 1..20: mol_type = other RNA
tggccttgatgatgacagtg

SEQ ID NO: 966 - RNA, 20 nt, synthetic construct
  misc_feature 1..20: note = spacer sequence
  source 1..20: mol_type = other RNA
aggccaagaagagcagattt

SEQ ID NO: 967 - RNA, 20 nt, synthetic construct
  misc_feature 1..20: note = spacer sequence
  source 1..20: mol_type = other RNA
tcaaggccaagaagagcaga

SEQ ID NO: 968 - RNA, 20 nt, synthetic construct
  misc_feature 1..20: note = spacer sequence
  source 1..20: mol_type = other RNA
tcatcaaggccaagaagagc

SEQ ID NO: 969 - RNA, 20 nt, synthetic construct
  misc_feature 1..20: note = spacer sequence
  source 1..20: mol_type = other RNA
ctttcttccagatttgatga

SEQ ID NO: 970 - RNA, 20 nt, synthetic construct
  misc_feature 1..20: note = spacer sequence
  source 1..20: mol_type = other RNA
ttcttccagatttgatgagt

SEQ ID NO: 971 - RNA, 20 nt, synthetic construct
  misc_feature 1..20: note = spacer sequence
  source 1..20: mol_type = other RNA
tccagatttgatgagtgtgg

SEQ ID NO: 972 - RNA, 20 nt, synthetic construct
  misc_feature 1..20: note = spacer sequence
  source 1..20: mol_type = other RNA
agatttgatgagtgtggggc

SEQ ID NO: 973 - RNA, 20 nt, synthetic construct
  misc_feature 1..20: note = spacer sequence
  source 1..20: mol_type = other RNA
ggaagaaagagaccactgtc

SEQ ID NO: 974 - RNA, 20 nt, synthetic construct
  misc_feature 1..20: note = spacer sequence
  source 1..20: mol_type = other RNA
aatctggaagaaagagacca

SEQ ID NO: 975 - RNA, 20 nt, synthetic construct
  misc_feature 1..20: note = spacer sequence
  source 1..20: mol_type = other RNA
tcaaatctggaagaaagaga

SEQ ID NO: 976 - RNA, 20 nt, synthetic construct
  misc_feature 1..20: note = spacer sequence
  source 1..20: mol_type = other RNA
aaacccccttacaaattttc

SEQ ID NO: 977 - RNA, 20 nt, synthetic construct
  misc_feature 1..20: note = spacer sequence
  source 1..20: mol_type = other RNA
tacatatggtatcaaaaccc

SEQ ID NO: 978 - RNA, 20 nt, synthetic construct
  misc_feature 1..20: note = spacer sequence
  source 1..20: mol_type = other RNA
tgtcctacatatggtatcaa

SEQ ID NO: 979 - RNA, 20 nt, synthetic construct
  misc_feature 1..20: note = spacer sequence
  source 1..20: mol_type = other RNA
ataaacattgtatttattcc

SEQ ID NO: 980 - RNA, 20 nt, synthetic construct
  misc_feature 1..20: note = spacer sequence
  source 1..20: mol_type = other RNA
tgcatctcagatcattgtat

SEQ ID NO: 981 - RNA, 20 nt, synthetic construct
  misc_feature 1..20: note = spacer sequence
  source 1..20: mol_type = other RNA
cagatcattgtattcaattc

SEQ ID NO: 982 - RNA, 20 nt, synthetic construct
  misc_feature 1..20: note = spacer sequence
  source 1..20: mol_type = other RNA
gatcattgtattcaattcaa

SEQ ID NO: 983 - RNA, 20 nt, synthetic construct
  misc_feature 1..20: note = spacer sequence
  source 1..20: mol_type = other RNA
gagatgcaagagttctataa

SEQ ID NO: 984 - RNA, 20 nt, synthetic construct
  misc_feature 1..20: note = spacer sequence
  source 1..20: mol_type = other RNA
ttgtattcaattcaaagtgt

SEQ ID NO: 985 - RNA, 20 nt, synthetic construct
  misc_feature 1..20: note = spacer sequence
  source 1..20: mol_type = other RNA
attcaaagtgtgtaatttta

SEQ ID NO: 986 - RNA, 20 nt, synthetic construct
  misc_feature 1..20: note = spacer sequence
  source 1..20: mol_type = other RNA
gtgcaacaaagatagagatg

SEQ ID NO: 987 - RNA, 20 nt, synthetic construct
  misc_feature 1..20: note = spacer sequence
  source 1..20: mol_type = other RNA
ctacatcccctctctgcctt

SEQ ID NO: 988 - RNA, 20 nt, synthetic construct
  misc_feature 1..20: note = spacer sequence
  source 1..20: mol_type = other RNA
cctctctgcctttgttttct

SEQ ID NO: 989 - RNA, 20 nt, synthetic construct
  misc_feature 1..20: note = spacer sequence
  source 1..20: mol_type = other RNA
ctgcctttgttttctcatct

SEQ ID NO: 990 - RNA, 20 nt, synthetic construct
  misc_feature 1..20: note = spacer sequence
  source 1..20: mol_type = other RNA
gcctttgttttctcatctgt

SEQ ID NO: 991 - RNA, 20 nt, synthetic construct
  misc_feature 1..20: note = spacer sequence
  source 1..20: mol_type = other RNA
catctgtaaagtgggaataa

SEQ ID NO: 992 - RNA, 20 nt, synthetic construct
  misc_feature 1..20: note = spacer sequence
  source 1..20: mol_type = other RNA
tctgtaaagtgggaataata

SEQ ID NO: 993 - RNA, 20 nt, synthetic construct
  misc_feature 1..20: note = spacer sequence
  source 1..20: mol_type = other RNA
gtaaagtgggaataataata

SEQ ID NO: 994 - RNA, 20 nt, synthetic construct
  misc_feature 1..20: note = spacer sequence
  source 1..20: mol_type = other RNA
cactttacagatgagaaaac

SEQ ID NO: 995 - RNA, 20 nt, synthetic construct
  misc_feature 1..20: note = spacer sequence
  source 1..20: mol_type = other RNA
ctaagtatttatttttattt

SEQ ID NO: 996 - RNA, 20 nt, synthetic construct
  misc_feature 1..20: note = spacer sequence
  source 1..20: mol_type = other RNA
cactaagtatttatttttat

SEQ ID NO: 997 - RNA, 20 nt, synthetic construct
  misc_feature 1..20: note = spacer sequence
  source 1..20: mol_type = other RNA
ccctcactggtcactttgct

SEQ ID NO: 998 - RNA, 20 nt, synthetic construct
  misc_feature 1..20: note = spacer sequence
  source 1..20: mol_type = other RNA
ctcactggtcactttgcttg

SEQ ID NO: 999 - RNA, 20 nt, synthetic construct
  misc_feature 1..20: note = spacer sequence
  source 1..20: mol_type = other RNA
ctggtcactttgcttggggg

SEQ ID NO: 1000 - RNA, 20 nt, synthetic construct
  misc_feature 1..20: note = spacer sequence
  source 1..20: mol_type = other RNA
ctttgcttgggggttcaaat

SEQ ID NO: 1001 - RNA, 20 nt, synthetic construct
  misc_feature 1..20: note = spacer sequence
  source 1..20: mol_type = other RNA
aattataacccaaagctatg

SEQ ID NO: 1002 - RNA, 20 nt, synthetic construct
  misc_feature 1..20: note = spacer sequence
  source 1..20: mol_type = other RNA
atagctttgggttataattt

SEQ ID NO: 1003 - RNA, 20 nt, synthetic construct
  misc_feature 1..20: note = spacer sequence
  source 1..20: mol_type = other RNA
caagtaagcatattccatag

SEQ ID NO: 1004 - RNA, 20 nt, synthetic construct
  misc_feature 1..20: note = spacer sequence
  source 1..20: mol_type = other RNA
cccaagtaagcatattccat

SEQ ID NO: 1005 - RNA, 20 nt, synthetic construct
  misc_feature 1..20: note = spacer sequence
  source 1..20: mol_type = other RNA
tacagctcctatacatgaat

SEQ ID NO: 1006 - RNA, 20 nt, synthetic construct
  misc_feature 1..20: note = spacer sequence
  source 1..20: mol_type = other RNA
tatacatgaatctttttgaa

SEQ ID NO: 1007 - RNA, 20 nt, synthetic construct
  misc_feature 1..20: note = spacer sequence
  source 1..20: mol_type = other RNA
tgtataggagctgtaagaat

SEQ ID NO: 1008 - RNA, 20 nt, synthetic construct
  misc_feature 1..20: note = spacer sequence
  source 1..20: mol_type = other RNA
ttttgaaacatatcaagggt

SEQ ID NO: 1009 - RNA, 20 nt, synthetic construct
  misc_feature 1..20: note = spacer sequence
  source 1..20: mol_type = other RNA
aaaagattcatgtataggag

SEQ ID NO: 1010 - RNA, 20 nt, synthetic construct
  misc_feature 1..20: note = spacer sequence
  source 1..20: mol_type = other RNA
agggtccttagaaatctgat

SEQ ID NO: 1011 - RNA, 20 nt, synthetic construct
  misc_feature 1..20: note = spacer sequence
  source 1..20: mol_type = other RNA
ttagaaatctgatctggtgt

SEQ ID NO: 1012 - RNA, 20 nt, synthetic construct
  misc_feature 1..20: note = spacer sequence
  source 1..20: mol_type = other RNA
aaggacccttgatatgtttc

SEQ ID NO: 1013 - RNA, 20 nt, synthetic construct
  misc_feature 1..20: note = spacer sequence
  source 1..20: mol_type = other RNA
gatctggtgtgactctcaga

SEQ ID NO: 1014 - RNA, 20 nt, synthetic construct
  misc_feature 1..20: note = spacer sequence
  source 1..20: mol_type = other RNA
gatttctaaggacccttgat

SEQ ID NO: 1015 - RNA, 20 nt, synthetic construct
  misc_feature 1..20: note = spacer sequence
  source 1..20: mol_type = other RNA
ggtgtgactctcagagcact

SEQ ID NO: 1016 - RNA, 20 nt, synthetic construct
  misc_feature 1..20: note = spacer sequence
  source 1..20: mol_type = other RNA
caccagatcagatttctaag

SEQ ID NO: 1017 - RNA, 20 nt, synthetic construct
  misc_feature 1..20: note = spacer sequence
  source 1..20: mol_type = other RNA
cagagcactctgatgacacc

SEQ ID NO: 1018 - RNA, 20 nt, synthetic construct
  misc_feature 1..20: note = spacer sequence
  source 1..20: mol_type = other RNA
gagcactctgatgacacctg

SEQ ID NO: 1019 - RNA, 20 nt, synthetic construct
  misc_feature 1..20: note = spacer sequence
  source 1..20: mol_type = other RNA
gagagtcacaccagatcaga

SEQ ID NO: 1020 - RNA, 20 nt, synthetic construct
  misc_feature 1..20: note = spacer sequence
  source 1..20: mol_type = other RNA
gatgacacctgctggctagg

SEQ ID NO: 1021 - RNA, 20 nt, synthetic construct
  misc_feature 1..20: note = spacer sequence
  source 1..20: mol_type = other RNA
gagtgctctgagagtcacac

SEQ ID NO: 1022 - RNA, 20 nt, synthetic construct
  misc_feature 1..20: note = spacer sequence
  source 1..20: mol_type = other RNA
tcagagtgctctgagagtca

SEQ ID NO: 1023 - RNA, 20 nt, synthetic construct
  misc_feature 1..20: note = spacer sequence
  source 1..20: mol_type = other RNA
caccatgcctagccagcagg

SEQ ID NO: 1024 - RNA, 20 nt, synthetic construct
  misc_feature 1..20: note = spacer sequence
  source 1..20: mol_type = other RNA
agtctggacagacggagatg

SEQ ID NO: 1025 - RNA, 20 nt, synthetic construct
  misc_feature 1..20: note = spacer sequence
  source 1..20: mol_type = other RNA
ggacagacggagatggtctg

SEQ ID NO: 1026 - RNA, 20 nt, synthetic construct
  misc_feature 1..20: note = spacer sequence
  source 1..20: mol_type = other RNA
agactagaacacacttgtca

SEQ ID NO: 1027 - RNA, 20 nt, synthetic construct
  misc_feature 1..20: note = spacer sequence
  source 1..20: mol_type = other RNA
gtccagactagaacacactt

SEQ ID NO: 1028 - RNA, 20 nt, synthetic construct
  misc_feature 1..20: note = spacer sequence
  source 1..20: mol_type = other RNA
gtctgtccagactagaacac

SEQ ID NO: 1029 - RNA, 20 nt, synthetic construct
  misc_feature 1..20: note = spacer sequence
  source 1..20: mol_type = other RNA
ccgtctgtccagactagaac

SEQ ID NO: 1030 - RNA, 20 nt, synthetic construct
  misc_feature 1..20: note = spacer sequence
  source 1..20: mol_type = other RNA
ggaacccctgagtggagtac

SEQ ID NO: 1031 - RNA, 20 nt, synthetic construct
  misc_feature 1..20: note = spacer sequence
  source 1..20: mol_type = other RNA
agaccatctccgtctgtcca

SEQ ID NO: 1032 - RNA, 20 nt, synthetic construct
  misc_feature 1..20: note = spacer sequence
  source 1..20: mol_type = other RNA
ggggttccagaccatctccg

SEQ ID NO: 1033 - RNA, 20 nt, synthetic construct
  misc_feature 1..20: note = spacer sequence
  source 1..20: mol_type = other RNA
actcaggggttccagaccat

SEQ ID NO: 1034 - RNA, 20 nt, synthetic construct
  misc_feature 1..20: note = spacer sequence
  source 1..20: mol_type = other RNA
caggtactccactcaggggt

SEQ ID NO: 1035 - RNA, 20 nt, synthetic construct
  misc_feature 1..20: note = spacer sequence
  source 1..20: mol_type = other RNA
gcttcccaggtactccactc

SEQ ID NO: 1036 - RNA, 20 nt, synthetic construct
  misc_feature 1..20: note = spacer sequence
  source 1..20: mol_type = other RNA
agcctcagcttcccaggtac

SEQ ID NO: 1037 - RNA, 20 nt, synthetic construct
  misc_feature 1..20: note = spacer sequence
  source 1..20: mol_type = other RNA
ccagcctcagcttcccaggt

SEQ ID NO: 1038 - RNA, 20 nt, synthetic construct
  misc_feature 1..20: note = spacer sequence
  source 1..20: mol_type = other RNA
ctccagcctcagcttcccag

SEQ ID NO: 1039 - RNA, 20 nt, synthetic construct
  misc_feature 1..20: note = spacer sequence
  source 1..20: mol_type = other RNA
tgaccttcaatcttgctgtg

SEQ ID NO: 1040 - RNA, 20 nt, synthetic construct
  misc_feature 1..20: note = spacer sequence
  source 1..20: mol_type = other RNA
ggatttctctccagcctcag

SEQ ID NO: 1041 - RNA, 20 nt, synthetic construct
  misc_feature 1..20: note = spacer sequence
  source 1..20: mol_type = other RNA
atcttgctgtgcaaagtgtg

SEQ ID NO: 1042 - RNA, 20 nt, synthetic construct
  misc_feature 1..20: note = spacer sequence
  source 1..20: mol_type = other RNA
tgctgtgcaaagtgtggtcc

SEQ ID NO: 1043 - RNA, 20 nt, synthetic construct
  misc_feature 1..20: note = spacer sequence
  source 1..20: mol_type = other RNA
tagggcctgcagtatcggga

SEQ ID NO: 1044 - RNA, 20 nt, synthetic construct
  misc_feature 1..20: note = spacer sequence
  source 1..20: mol_type = other RNA
ggatcactaggagcttgtaa

SEQ ID NO: 1045 - RNA, 20 nt, synthetic construct
  misc_feature 1..20: note = spacer sequence
  source 1..20: mol_type = other RNA
cgatactgcaggccctagga

SEQ ID NO: 1046 - RNA, 20 nt, synthetic construct
  misc_feature 1..20: note = spacer sequence
  source 1..20: mol_type = other RNA
ctaggagcttgtaaatgtgg

SEQ ID NO: 1047 - RNA, 20 nt, synthetic construct
  misc_feature 1..20: note = spacer sequence
  source 1..20: mol_type = other RNA
tagtgatcccgatactgcag

SEQ ID NO: 1048 - RNA, 20 nt, synthetic construct
  misc_feature 1..20: note = spacer sequence
  source 1..20: mol_type = other RNA
cacatttacaagctcctagt

SEQ ID NO: 1049 - RNA, 20 nt, synthetic construct
  misc_feature 1..20: note = spacer sequence
  source 1..20: mol_type = other RNA
gactctacattttttttttt

SEQ ID NO: 1050 - RNA, 20 nt, synthetic construct
  misc_feature 1..20: note = spacer sequence
  source 1..20: mol_type = other RNA
gatcccacatttacaagctc

SEQ ID NO: 1051 - RNA, 20 nt, synthetic construct
  misc_feature 1..20: note = spacer sequence
  source 1..20: mol_type = other RNA
acatttttttttttagagac

SEQ ID NO: 1052 - RNA, 20 nt, synthetic construct
  misc_feature 1..20: note = spacer sequence
  source 1..20: mol_type = other RNA
aaaaaaaaaaatgtagagtc

SEQ ID NO: 1053 - RNA, 20 nt, synthetic construct
  misc_feature 1..20: note = spacer sequence
  source 1..20: mol_type = other RNA
ctaaaaaaaaaaatgtagag

SEQ ID NO: 1054 - RNA, 20 nt, synthetic construct
  misc_feature 1..20: note = spacer sequence
  source 1..20: mol_type = other RNA
tgctgtgttacccaggctgg

SEQ ID NO: 1055 - RNA, 20 nt, synthetic construct
  misc_feature 1..20: note = spacer sequence
  source 1..20: mol_type = other RNA
caaactcctaagctcaagca

SEQ ID NO: 1056 - RNA, 20 nt, synthetic construct
  misc_feature 1..20: note = spacer sequence
  source 1..20: mol_type = other RNA
aactcctaagctcaagcaat

SEQ ID NO: 1057 - RNA, 20 nt, synthetic construct
  misc_feature 1..20: note = spacer sequence
  source 1..20: mol_type = other RNA
taagctcaagcaatcctcct

SEQ ID NO: 1058 - RNA, 20 nt, synthetic construct
  misc_feature 1..20: note = spacer sequence
  source 1..20: mol_type = other RNA
agcaatcctcctgcctcagc

SEQ ID NO: 1059 - RNA, 20 nt, synthetic construct
  misc_feature 1..20: note = spacer sequence
  source 1..20: mol_type = other RNA
acaaaaaatacaaaaattag

SEQ ID NO: 1060 - RNA, 20 nt, synthetic construct
  misc_feature 1..20: note = spacer sequence
  source 1..20: mol_type = other RNA
ctacaaaaaatacaaaaatt

SEQ ID NO: 1061 - RNA, 20 nt, synthetic construct
  misc_feature 1..20: note = spacer sequence
  source 1..20: mol_type = other RNA
ccatgttacccagactggtc

SEQ ID NO: 1062 - RNA, 20 nt, synthetic construct
  misc_feature 1..20: note = spacer sequence
  source 1..20: mol_type = other RNA
gggtaacatggtgaaacctt

SEQ ID NO: 1063 - RNA, 20 nt, synthetic construct
  misc_feature 1..20: note = spacer sequence
  source 1..20: mol_type = other RNA
tgaactcctgagctcaagca

SEQ ID NO: 1064 - RNA, 20 nt, synthetic construct
  misc_feature 1..20: note = spacer sequence
  source 1..20: mol_type = other RNA
agaccagtctgggtaacatg

SEQ ID NO: 1065 - RNA, 20 nt, synthetic construct
  misc_feature 1..20: note = spacer sequence
  source 1..20: mol_type = other RNA
tgagctcaagcaatccaccc

SEQ ID NO: 1066 - RNA, 20 nt, synthetic construct
  misc_feature 1..20: note = spacer sequence
  source 1..20: mol_type = other RNA
ggagttcaagaccagtctgg

SEQ ID NO: 1067 - RNA, 20 nt, synthetic construct
  misc_feature 1..20: note = spacer sequence
  source 1..20: mol_type = other RNA
agcaatccacccacatcagc

SEQ ID NO: 1068 - RNA, 20 nt, synthetic construct
  misc_feature 1..20: note = spacer sequence
  source 1..20: mol_type = other RNA
acccacatcagcctcctgaa

SEQ ID NO: 1069 - RNA, 20 nt, synthetic construct
  misc_feature 1..20: note = spacer sequence
  source 1..20: mol_type = other RNA
gcctcctgaagtgctgggat

SEQ ID NO: 1070 - RNA, 20 nt, synthetic construct
  misc_feature 1..20: note = spacer sequence
  source 1..20: mol_type = other RNA
tgaagtgctgggattacagg

SEQ ID NO: 1071 - RNA, 20 nt, synthetic construct
  misc_feature 1..20: note = spacer sequence
  source 1..20: mol_type = other RNA
ggaggctgatgtgggtggat

SEQ ID NO: 1072 - RNA, 20 nt, synthetic construct
  misc_feature 1..20: note = spacer sequence
  source 1..20: mol_type = other RNA
cagcacttcaggaggctgat

SEQ ID NO: 1073 - RNA, 20 nt, synthetic construct
  misc_feature 1..20: note = spacer sequence
  source 1..20: mol_type = other RNA
tgcctgtaatcccagcactt

SEQ ID NO: 1074 - RNA, 20 nt, synthetic construct
  misc_feature 1..20: note = spacer sequence
  source 1..20: mol_type = other RNA
gccaggcacaatggctcatg

SEQ ID NO: 1075 - RNA, 20 nt, synthetic construct
  misc_feature 1..20: note = spacer sequence
  source 1..20: mol_type = other RNA
acatagggctagcaactcac

SEQ ID NO: 1076 - RNA, 20 nt, synthetic construct
  misc_feature 1..20: note = spacer sequence
  source 1..20: mol_type = other RNA
tattttcatttttatcctgt

SEQ ID NO: 1077 - RNA, 20 nt, synthetic construct
  misc_feature 1..20: note = spacer sequence
  source 1..20: mol_type = other RNA
tttttatcctgttttctact

SEQ ID NO: 1078 - RNA, 20 nt, synthetic construct
  misc_feature 1..20: note = spacer sequence
  source 1..20: mol_type = other RNA
tgttttctacttattctgtt

SEQ ID NO: 1079 - RNA, 20 nt, synthetic construct
  misc_feature 1..20: note = spacer sequence
  source 1..20: mol_type = other RNA
acttattctgttgaagacat

SEQ ID NO: 1080 - RNA, 20 nt, synthetic construct
  misc_feature 1..20: note = spacer sequence
  source 1..20: mol_type = other RNA
gttgaagacatttttcctcc

SEQ ID NO: 1081 - RNA, 20 nt, synthetic construct
  misc_feature 1..20: note = spacer sequence
  source 1..20: mol_type = other RNA
acagaataagtagaaaacag

SEQ ID NO: 1082 - RNA, 20 nt, synthetic construct
  misc_feature 1..20: note = spacer sequence
  source 1..20: mol_type = other RNA
tcaacagaataagtagaaaa

SEQ ID NO: 1083 - RNA, 20 nt, synthetic construct
  misc_feature 1..20: note = spacer sequence
  source 1..20: mol_type = other RNA
cagctactcaggaggctgag

SEQ ID NO: 1084 - RNA, 20 nt, synthetic construct
  misc_feature 1..20: note = spacer sequence
  source 1..20: mol_type = other RNA
ggaggctgaggcaagagaat

SEQ ID NO: 1085 - RNA, 20 nt, synthetic construct
  misc_feature 1..20: note = spacer sequence
  source 1..20: mol_type = other RNA
tgagtagctgggactacagg

SEQ ID NO: 1086 - RNA, 20 nt, synthetic construct
  misc_feature 1..20: note = spacer sequence
  source 1..20: mol_type = other RNA
gcctcctgagtagctgggac

SEQ ID NO: 1087 - RNA, 20 nt, synthetic construct
  misc_feature 1..20: note = spacer sequence
  source 1..20: mol_type = other RNA
tgcctcagcctcctgagtag

SEQ ID NO: 1088 - RNA, 20 nt, synthetic construct
  misc_feature 1..20: note = spacer sequence
  source 1..20: mol_type = other RNA
cttgcctcagcctcctgagt

SEQ ID NO: 1089 - RNA, 20 nt, synthetic construct
  misc_feature 1..20: note = spacer sequence
  source 1..20: mol_type = other RNA
cttgaacccgggaggcggag

SEQ ID NO: 1090 - RNA, 20 nt, synthetic construct
  misc_feature 1..20: note = spacer sequence
  source 1..20: mol_type = other RNA
agtgattctcttgcctcagc

SEQ ID NO: 1091 - RNA, 20 nt, synthetic construct
  misc_feature 1..20: note = spacer sequence
  source 1..20: mol_type = other RNA
cgggttcaagtgattctctt

SEQ ID NO: 1092 - RNA, 20 nt, synthetic construct
  misc_feature 1..20: note = spacer sequence
  source 1..20: mol_type = other RNA
gcctcccgggttcaagtgat

SEQ ID NO: 1093 - RNA, 20 nt, synthetic construct
  misc_feature 1..20: note = spacer sequence
  source 1..20: mol_type = other RNA
ctgcaacctccgcctcccgg

SEQ ID NO: 1094 - RNA, 20 nt, synthetic construct
  misc_feature 1..20: note = spacer sequence
  source 1..20: mol_type = other RNA
gctcactgcaacctccgcct

SEQ ID NO: 1095 - RNA, 20 nt, synthetic construct
  misc_feature 1..20: note = spacer sequence
  source 1..20: mol_type = other RNA
tgtctgggccacagagcgag

SEQ ID NO: 1096 - RNA, 20 nt, synthetic construct
  misc_feature 1..20: note = spacer sequence
  source 1..20: mol_type = other RNA
gggccacagagcgagaatcc

SEQ ID NO: 1097 - RNA, 20 nt, synthetic construct
  misc_feature 1..20: note = spacer sequence
  source 1..20: mol_type = other RNA
ttttttttttaaatagattt

SEQ ID NO: 1098 - RNA, 20 nt, synthetic construct
  misc_feature 1..20: note = spacer sequence
  source 1..20: mol_type = other RNA
ttctttttttttttaaatag

SEQ ID NO: 1099 - RNA, 20 nt, synthetic construct
  misc_feature 1..20: note = spacer sequence
  source 1..20: mol_type = other RNA
ttttctttcttttttttttt

SEQ ID NO: 1100 - RNA, 20 nt, synthetic construct
  misc_feature 1..20: note = spacer sequence
  source 1..20: mol_type = other RNA
attttctttttctttctttt

SEQ ID NO: 1101 - RNA, 20 nt, synthetic construct
  misc_feature 1..20: note = spacer sequence
  source 1..20: mol_type = other RNA
agctgaaaagaagaaaaggt

SEQ ID NO: 1102 - RNA, 20 nt, synthetic construct
  misc_feature 1..20: note = spacer sequence
  source 1..20: mol_type = other RNA
gcttgaaaacatcaattttc

SEQ ID NO: 1103 - RNA, 20 nt, synthetic construct
  misc_feature 1..20: note = spacer sequence
  source 1..20: mol_type = other RNA
tttcagcttgaaaacatcaa

SEQ ID NO: 1104 - RNA, 20 nt, synthetic construct
  misc_feature 1..20: note = spacer sequence
  source 1..20: mol_type = other RNA
tcttttcagcttgaaaacat

SEQ ID NO: 1105 - RNA, 20 nt, synthetic construct
  misc_feature 1..20: note = spacer sequence
  source 1..20: mol_type = other RNA
cctgcctattaaccttttct

SEQ ID NO: 1106 - RNA, 20 nt, synthetic construct
  misc_feature 1..20: note = spacer sequence
  source 1..20: mol_type = other RNA
tcggaataaaacagaaatta

SEQ ID NO: 1107 - RNA, 20 nt, synthetic construct
  misc_feature 1..20: note = spacer sequence
  source 1..20: mol_type = other RNA
gaataaaacagaaattaaac

SEQ ID NO: 1108 - RNA, 20 nt, synthetic construct
  misc_feature 1..20: note = spacer sequence
  source 1..20: mol_type = other RNA
gatgacgtggtagaaagttg

SEQ ID NO: 1109 - RNA, 20 nt, synthetic construct
  misc_feature 1..20: note = spacer sequence
  source 1..20: mol_type = other RNA
gttttattccgatgacgtgg

SEQ ID NO: 1110 - RNA, 20 nt, synthetic construct
  misc_feature 1..20: note = spacer sequence
  source 1..20: mol_type = other RNA
actgtttaatttctgtttta

SEQ ID NO: 1111 - RNA, 20 nt, synthetic construct
  misc_feature 1..20: note = spacer sequence
  source 1..20: mol_type = other RNA
actcccccaagacctctggt

SEQ ID NO: 1112 - RNA, 20 nt, synthetic construct
  misc_feature 1..20: note = spacer sequence
  source 1..20: mol_type = other RNA
cccaagacctctggtgtcca

SEQ ID NO: 1113 - RNA, 20 nt, synthetic construct
  misc_feature 1..20: note = spacer sequence
  source 1..20: mol_type = other RNA
tgggggagtagaggcccttt

SEQ ID NO: 1114 - RNA, 20 nt, synthetic construct
  misc_feature 1..20: note = spacer sequence
  source 1..20: mol_type = other RNA
ggtgtccacccccatctaat

SEQ ID NO: 1115 - RNA, 20 nt, synthetic construct
  misc_feature 1..20: note = spacer sequence
  source 1..20: mol_type = other RNA
acccccatctaatattctta

SEQ ID NO: 1116 - RNA, 20 nt, synthetic construct
  misc_feature 1..20: note = spacer sequence
  source 1..20: mol_type = other RNA
tcttatgtaaaaaagaaata

SEQ ID NO: 1117 - RNA, 20 nt, synthetic construct
  misc_feature 1..20: note = spacer sequence
  source 1..20: mol_type = other RNA
ttcttcttatgtaaaaaaga

SEQ ID NO: 1118 - RNA, 20 nt, synthetic construct
  misc_feature 1..20: note = spacer sequence
  source 1..20: mol_type = other RNA
tagctatgcagtctttcttc

SEQ ID NO: 1119 - RNA, 20 nt, synthetic construct
  misc_feature 1..20: note = spacer sequence
  source 1..20: mol_type = other RNA
gtcaccagagccacgcaaga

SEQ ID NO: 1120 - RNA, 20 nt, synthetic construct
  misc_feature 1..20: note = spacer sequence
  source 1..20: mol_type = other RNA
ccagagccacgcaagagatc

SEQ ID NO: 1121 - RNA, 20 nt, synthetic construct
  misc_feature 1..20: note = spacer sequence
  source 1..20: mol_type = other RNA
ggtgacagagtgtatttttc

SEQ ID NO: 1122 - RNA, 20 nt, synthetic construct
  misc_feature 1..20: note = spacer sequence
  source 1..20: mol_type = other RNA
tgcgtggctctggtgacaga

SEQ ID NO: 1123 - RNA, 20 nt, synthetic construct
  misc_feature 1..20: note = spacer sequence
  source 1..20: mol_type = other RNA
cttgcgtggctctggtgaca

SEQ ID NO: 1124 - RNA, 20 nt, synthetic construct
  misc_feature 1..20: note = spacer sequence
  source 1..20: mol_type = other RNA
ttagaggaataaatagccgc

SEQ ID NO: 1125 - RNA, 20 nt, synthetic construct
  misc_feature 1..20: note = spacer sequence
  source 1..20: mol_type = other RNA
aaagatctcttgcgtggctc

SEQ ID NO: 1126 - RNA, 20 nt, synthetic construct
  misc_feature 1..20: note = spacer sequence
  source 1..20: mol_type = other RNA
tctaaagatctcttgcgtgg

SEQ ID NO: 1127 - RNA, 20 nt, synthetic construct
  misc_feature 1..20: note = spacer sequence
  source 1..20: mol_type = other RNA
catagcaacattcagatgaa

SEQ ID NO: 1128 - RNA, 20 nt, synthetic construct
  misc_feature 1..20: note = spacer sequence
  source 1..20: mol_type = other RNA
tagcaacattcagatgaaca

SEQ ID NO: 1129 - RNA, 20 nt, synthetic construct
  misc_feature 1..20: note = spacer sequence
  source 1..20: mol_type = other RNA
gatgaacaatgctgagagct

SEQ ID NO: 1130 - RNA, 20 nt, synthetic construct
  misc_feature 1..20: note = spacer sequence
  source 1..20: mol_type = other RNA
gaatgttgctatgagactgc

SEQ ID NO: 1131 - RNA, 20 nt, synthetic construct
  misc_feature 1..20: note = spacer sequence
  source 1..20: mol_type = other RNA
tctgaatgttgctatgagac

SEQ ID NO: 1132 - RNA, 20 nt, synthetic construct
  misc_feature 1..20: note = spacer sequence
  source 1..20: mol_type = other RNA
gcattgttcatctgaatgtt

SEQ ID NO: 1133 - RNA, 20 nt, synthetic construct
  misc_feature 1..20: note = spacer sequence
  source 1..20: mol_type = other RNA
cagcattgttcatctgaatg

SEQ ID NO: 1134 - RNA, 20 nt, synthetic construct
  misc_feature 1..20: note = spacer sequence
  source 1..20: mol_type = other RNA
gctctcagcattgttcatct

SEQ ID NO: 1135 - RNA, 20 nt, synthetic construct
  misc_feature 1..20: note = spacer sequence
  source 1..20: mol_type = other RNA
ttcagctctcagcattgttc

SEQ ID NO: 1136 - RNA, 20 nt, synthetic construct
  misc_feature 1..20: note = spacer sequence
  source 1..20: mol_type = other RNA
tcggttagaaattcatgcct

SEQ ID NO: 1137 - RNA, 20 nt, synthetic construct
  misc_feature 1..20: note = spacer sequence
  source 1..20: mol_type = other RNA
gttagaaattcatgcctaca

SEQ ID NO: 1138 - RNA, 20 nt, synthetic construct
  misc_feature 1..20: note = spacer sequence
  source 1..20: mol_type = other RNA
aaccgaagaacatctttcag

SEQ ID NO: 1139 - RNA, 20 nt, synthetic construct
  misc_feature 1..20: note = spacer sequence
  source 1..20: mol_type = other RNA
tgcctacaaaagaataccat

SEQ ID NO: 1140 - RNA, 20 nt, synthetic construct
  misc_feature 1..20: note = spacer sequence
  source 1..20: mol_type = other RNA
tttaggttccccatctctgg

SEQ ID NO: 1141 - RNA, 20 nt, synthetic construct
  misc_feature 1..20: note = spacer sequence
  source 1..20: mol_type = other RNA
ccatctctggcccatggact

SEQ ID NO: 1142 - RNA, 20 nt, synthetic construct
  misc_feature 1..20: note = spacer sequence
  source 1..20: mol_type = other RNA
ctggcccatggactttgggg

SEQ ID NO: 1143 - RNA, 20 nt, synthetic construct
  misc_feature 1..20: note = spacer sequence
  source 1..20: mol_type = other RNA
ggcccatggactttggggga

SEQ ID NO: 1144 - RNA, 20 nt, synthetic construct
  misc_feature 1..20: note = spacer sequence
  source 1..20: mol_type = other RNA
atgggccagagatggggaac

SEQ ID NO: 1145 - RNA, 20 nt, synthetic construct
  misc_feature 1..20: note = spacer sequence
  source 1..20: mol_type = other RNA
cccaaagtccatgggccaga

SEQ ID NO: 1146 - RNA, 20 nt, synthetic construct
  misc_feature 1..20: note = spacer sequence
  source 1..20: mol_type = other RNA
aggaaataagtcctttaatt

SEQ ID NO: 1147 - RNA, 20 nt, synthetic construct
  misc_feature 1..20: note = spacer sequence
  source 1..20: mol_type = other RNA
tggacctgctcccccaaagt

SEQ ID NO: 1148 - RNA, 20 nt, synthetic construct
  misc_feature 1..20: note = spacer sequence
  source 1..20: mol_type = other RNA
tttaattggaagccagaagt

SEQ ID NO: 1149 - RNA, 20 nt, synthetic construct
  misc_feature 1..20: note = spacer sequence
  source 1..20: mol_type = other RNA
aattaaaggacttatttcct

SEQ ID NO: 1150 - RNA, 20 nt, synthetic construct
  misc_feature 1..20: note = spacer sequence
  source 1..20: mol_type = other RNA
ggaccttggagagatcaacg

SEQ ID NO: 1151 - RNA, 20 nt, synthetic construct
  misc_feature 1..20: note = spacer sequence
  source 1..20: mol_type = other RNA
tgataagccatcgtctcagc

SEQ ID NO: 1152 - RNA, 20 nt, synthetic construct
  misc_feature 1..20: note = spacer sequence
  source 1..20: mol_type = other RNA
aaggtcctgataagccatcg

SEQ ID NO: 1153 - RNA, 20 nt, synthetic construct
  misc_feature 1..20: note = spacer sequence
  source 1..20: mol_type = other RNA
ccaaggtcctgataagccat

SEQ ID NO: 1154 - RNA, 20 nt, synthetic construct
  misc_feature 1..20: note = spacer sequence
  source 1..20: mol_type = other RNA
ctccaaggtcctgataagcc

SEQ ID NO: 1155 - RNA, 20 nt, synthetic construct
  misc_feature 1..20: note = spacer sequence
  source 1..20: mol_type = other RNA
acgctatcctgagagattga

SEQ ID NO: 1156 - RNA, 20 nt, synthetic construct
  misc_feature 1..20: note = spacer sequence
  source 1..20: mol_type = other RNA
tgagagattgaattaaggta

SEQ ID NO: 1157 - RNA, 20 nt, synthetic construct
  misc_feature 1..20: note = spacer sequence
  source 1..20: mol_type = other RNA
ggatagcgttgatctctcca

SEQ ID NO: 1158 - RNA, 20 nt, synthetic construct
  misc_feature 1..20: note = spacer sequence
  source 1..20: mol_type = other RNA
caggatagcgttgatctctc

SEQ ID NO: 1159 - RNA, 20 nt, synthetic construct
  misc_feature 1..20: note = spacer sequence
  source 1..20: mol_type = other RNA
ctcaggatagcgttgatctc

SEQ ID NO: 1160 - RNA, 20 nt, synthetic construct
  misc_feature 1..20: note = spacer sequence
  source 1..20: mol_type = other RNA
atctctcaggatagcgttga

SEQ ID NO: 1161 - RNA, 20 nt, synthetic construct
  misc_feature 1..20: note = spacer sequence
  source 1..20: mol_type = other RNA
tggcaggcatttaccaatac

SEQ ID NO: 1162 - RNA, 20 nt, synthetic construct
  misc_feature 1..20: note = spacer sequence
  source 1..20: mol_type = other RNA
atcttggcaggcatttacca

SEQ ID NO: 1163 - RNA, 20 nt, synthetic construct
  misc_feature 1..20: note = spacer sequence
  source 1..20: mol_type = other RNA
taattcaatcttggcaggca

SEQ ID NO: 1164 - RNA, 20 nt, synthetic construct
  misc_feature 1..20: note = spacer sequence
  source 1..20: mol_type = other RNA
agcctaccaaggtatttacc

SEQ ID NO: 1165 - RNA, 20 nt, synthetic construct
  misc_feature 1..20: note = spacer sequence
  source 1..20: mol_type = other RNA
attgttctagcctaccaagg

SEQ ID NO: 1166 - RNA, 20 nt, synthetic construct
  misc_feature 1..20: note = spacer sequence
  source 1..20: mol_type = other RNA
tccattgttctagcctacca

SEQ ID NO: 1167 - RNA, 20 nt, synthetic construct
  misc_feature 1..20: note = spacer sequence
  source 1..20: mol_type = other RNA
aacaattgaaatttaatcgg

SEQ ID NO: 1168 - RNA, 20 nt, synthetic construct
  misc_feature 1..20: note = spacer sequence
  source 1..20: mol_type = other RNA
attgttagatttcatccatt

SEQ ID NO: 1169 - RNA, 20 nt, synthetic construct
  misc_feature 1..20: note = spacer sequence
  source 1..20: mol_type = other RNA
gaaaaaaaaagaaatttaat

SEQ ID NO: 1170 - RNA, 20 nt, synthetic construct
  misc_feature 1..20: note = spacer sequence
  source 1..20: mol_type = other RNA
gattaaatttcaattgttag

SEQ ID NO: 1171 - RNA, 20 nt, synthetic construct
  misc_feature 1..20: note = spacer sequence
  source 1..20: mol_type = other RNA
ttttttttccgattaaattt

SEQ ID NO: 1172 - RNA, 20 nt, synthetic construct
  misc_feature 1..20: note = spacer sequence
  source 1..20: mol_type = other RNA
ggataaatgtacattctggt

SEQ ID NO: 1173 - RNA, 20 nt, synthetic construct
  misc_feature 1..20: note = spacer sequence
  source 1..20: mol_type = other RNA
tgattaaatttctttttttt

SEQ ID NO: 1174 - RNA, 20 nt, synthetic construct
  misc_feature 1..20: note = spacer sequence
  source 1..20: mol_type = other RNA
ggtccacagaataccaagtg

SEQ ID NO: 1175 - RNA, 20 nt, synthetic construct
  misc_feature 1..20: note = spacer sequence
  source 1..20: mol_type = other RNA
acagaataccaagtgcataa

SEQ ID NO: 1176 - RNA, 20 nt, synthetic construct
  misc_feature 1..20: note = spacer sequence
  source 1..20: mol_type = other RNA
gtggaccagaatgtacattt

SEQ ID NO: 1177 - RNA, 20 nt, synthetic construct
  misc_feature 1..20: note = spacer sequence
  source 1..20: mol_type = other RNA
gttatttttatgcacttggt

SEQ ID NO: 1178 - RNA, 20 nt, synthetic construct
  misc_feature 1..20: note = spacer sequence
  source 1..20: mol_type = other RNA
cctgccaccacccccagcta

SEQ ID NO: 1179 - RNA, 20 nt, synthetic construct
  misc_feature 1..20: note = spacer sequence
  source 1..20: mol_type = other RNA
tcccagctactcaggaggct

SEQ ID NO: 1180 - RNA, 20 nt, synthetic construct
  misc_feature 1..20: note = spacer sequence
  source 1..20: mol_type = other RNA
cagctactcaggaggctgag

SEQ ID NO: 1181 - RNA, 20 nt, synthetic construct
  misc_feature 1..20: note = spacer sequence
  source 1..20: mol_type = other RNA
ggaggctgaggcaggagaat

SEQ ID NO: 1182 - RNA, 20 nt, synthetic construct
  misc_feature 1..20: note = spacer sequence
  source 1..20: mol_type = other RNA
tgagtagctgggatgacagt

SEQ ID NO: 1183 - RNA, 20 nt, synthetic construct
  misc_feature 1..20: note = spacer sequence
  source 1..20: mol_type = other RNA
gcctcctgagtagctgggat

SEQ ID NO: 1184 - RNA, 20 nt, synthetic construct
  misc_feature 1..20: note = spacer sequence
  source 1..20: mol_type = other RNA
tgcctcagcctcctgagtag

SEQ ID NO: 1185 - RNA, 20 nt, synthetic construct
  misc_feature 1..20: note = spacer sequence
  source 1..20: mol_type = other RNA
cctgcctcagcctcctgagt

SEQ ID NO: 1186 - RNA, 20 nt, synthetic construct
  misc_feature 1..20: note = spacer sequence
  source 1..20: mol_type = other RNA
agcaattctcctgcctcagc

SEQ ID NO: 1187 - RNA, 20 nt, synthetic construct
  misc_feature 1..20: note = spacer sequence
  source 1..20: mol_type = other RNA
tgggttcaagcaattctcct

SEQ ID NO: 1188 - RNA, 20 nt, synthetic construct
  misc_feature 1..20: note = spacer sequence
  source 1..20: mol_type = other RNA
gcctcctgggttcaagcaat

SEQ ID NO: 1189 - RNA, 20 nt, synthetic construct
  misc_feature 1..20: note = spacer sequence
  source 1..20: mol_type = other RNA
ctgcaacctccgcctcctgg

SEQ ID NO: 1190 - RNA, 20 nt, synthetic construct
  misc_feature 1..20: note = spacer sequence
  source 1..20: mol_type = other RNA
gctcactgcaacctccgcct

SEQ ID NO: 1191 - RNA, 20 nt, synthetic construct
  misc_feature 1..20: note = spacer sequence
  source 1..20: mol_type = other RNA
cagctcactgcaacctccgc

SEQ ID NO: 1192 - RNA, 20 nt, synthetic construct
  misc_feature 1..20: note = spacer sequence
  source 1..20: mol_type = other RNA
gactgggtgcagtggtgcac

SEQ ID NO: 1193 - RNA, 20 nt, synthetic construct
  misc_feature 1..20: note = spacer sequence
  source 1..20: mol_type = other RNA
gaacttaccattttcagaca

SEQ ID NO: 1194 - RNA, 20 nt, synthetic construct
  misc_feature 1..20: note = spacer sequence
  source 1..20: mol_type = other RNA
cagcactttgggaggccaag

SEQ ID NO: 1195 - RNA, 20 nt, synthetic construct
  misc_feature 1..20: note = spacer sequence
  source 1..20: mol_type = other RNA
caaagtgctgggattataag

SEQ ID NO: 1196 - RNA, 20 nt, synthetic construct
  misc_feature 1..20: note = spacer sequence
  source 1..20: mol_type = other RNA
caccttggcctcccaaagtg

SEQ ID NO: 1197 - RNA, 20 nt, synthetic construct
  misc_feature 1..20: note = spacer sequence
  source 1..20: mol_type = other RNA
tcccaccttggcctcccaaa

SEQ ID NO: 1198 - RNA, 20 nt, synthetic construct
  misc_feature 1..20: note = spacer sequence
  source 1..20: mol_type = other RNA
cttgagctcaagagttcaag

SEQ ID NO: 1199 - RNA, 20 nt, synthetic construct
  misc_feature 1..20: note = spacer sequence
  source 1..20: mol_type = other RNA
agtgatcctcccaccttggc

SEQ ID NO: 1200 - RNA, 20 nt, synthetic construct
  misc_feature 1..20: note = spacer sequence
  source 1..20: mol_type = other RNA
agagttcaagaccagcctgg

SEQ ID NO: 1201 - RNA, 20 nt, synthetic construct
  misc_feature 1..20: note = spacer sequence
  source 1..20: mol_type = other RNA
tgagctcaagtgatcctccc

SEQ ID NO: 1202 - RNA, 20 nt, synthetic construct
  misc_feature 1..20: note = spacer sequence
  source 1..20: mol_type = other RNA
agaccagcctgggcagtatg

SEQ ID NO: 1203 - RNA, 20 nt, synthetic construct
  misc_feature 1..20: note = spacer sequence
  source 1..20: mol_type = other RNA
tgaactcttgagctcaagtg

SEQ ID NO: 1204 - RNA, 20 nt, synthetic construct
  misc_feature 1..20: note = spacer sequence
  source 1..20: mol_type = other RNA
ctcaaaaaaaaaaaaaaaaa

SEQ ID NO: 1205 - RNA, 20 nt, synthetic construct
  misc_feature 1..20: note = spacer sequence
  source 1..20: mol_type = other RNA
caaaaaaaaaaaaaaaaaaa

SEQ ID NO: 1206 - RNA, 20 nt, synthetic construct
  misc_feature 1..20: note = spacer sequence
  source 1..20: mol_type = other RNA
aaaaaaaaaaaaaaaaaaaa

SEQ ID NO: 1207 - RNA, 20 nt, synthetic construct
  misc_feature 1..20: note = spacer sequence
  source 1..20: mol_type = other RNA
ccatcagaacctaaccttcc

SEQ ID NO: 1208 - RNA, 20 nt, synthetic construct
  misc_feature 1..20: note = spacer sequence
  source 1..20: mol_type = other RNA
cttcaccatcagaacctaac

SEQ ID NO: 1209 - RNA, 20 nt, synthetic construct
  misc_feature 1..20: note = spacer sequence
  source 1..20: mol_type = other RNA
gatggttacttcaccaagca

SEQ ID NO: 1210 - RNA, 20 nt, synthetic construct
  misc_feature 1..20: note = spacer sequence
  source 1..20: mol_type = other RNA
gaaccttcccttcaccatca

SEQ ID NO: 1211 - RNA, 20 nt, synthetic construct
  misc_feature 1..20: note = spacer sequence
  source 1..20: mol_type = other RNA
ccaagcaagagaagctctgg

SEQ ID NO: 1212 - RNA, 20 nt, synthetic construct
  misc_feature 1..20: note = spacer sequence
  source 1..20: mol_type = other RNA
tgcttggtgaagtaaccatc

SEQ ID NO: 1213 - RNA, 20 nt, synthetic construct
  misc_feature 1..20: note = spacer sequence
  source 1..20: mol_type = other RNA
cttgcttggtgaagtaacca

SEQ ID NO: 1214 - RNA, 20 nt, synthetic construct
  misc_feature 1..20: note = spacer sequence
  source 1..20: mol_type = other RNA
ggttgctgaagaagttccta

SEQ ID NO: 1215 - RNA, 20 nt, synthetic construct
  misc_feature 1..20: note = spacer sequence
  source 1..20: mol_type = other RNA
gcaaccagagcttctcttgc

SEQ ID NO: 1216 - RNA, 20 nt, synthetic construct
  misc_feature 1..20: note = spacer sequence
  source 1..20: mol_type = other RNA
tcagcaaccagagcttctct

SEQ ID NO: 1217 - RNA, 20 nt, synthetic construct
  misc_feature 1..20: note = spacer sequence
  source 1..20: mol_type = other RNA
tacagagggggatcctgcta

SEQ ID NO: 1218 - RNA, 20 nt, synthetic construct
  misc_feature 1..20: note = spacer sequence
  source 1..20: mol_type = other RNA
gtaggaacttcttcagcaac

SEQ ID NO: 1219 - RNA, 20 nt, synthetic construct
  misc_feature 1..20: note = spacer sequence
  source 1..20: mol_type = other RNA
ccctctgtaggaacttcttc

SEQ ID NO: 1220 - RNA, 20 nt, synthetic construct
  misc_feature 1..20: note = spacer sequence
  source 1..20: mol_type = other RNA
tgctatggtctgaatgtttg

SEQ ID NO: 1221 - RNA, 20 nt, synthetic construct
  misc_feature 1..20: note = spacer sequence
  source 1..20: mol_type = other RNA
gaatgtttgtttccctccca

SEQ ID NO: 1222 - RNA, 20 nt, synthetic construct
  misc_feature 1..20: note = spacer sequence
  source 1..20: mol_type = other RNA
gaccatagcaggatccccct

SEQ ID NO: 1223 - RNA, 20 nt, synthetic construct
  misc_feature 1..20: note = spacer sequence
  source 1..20: mol_type = other RNA
ctcccaaattcatatgttga

SEQ ID NO: 1224 - RNA, 20 nt, synthetic construct
  misc_feature 1..20: note = spacer sequence
  source 1..20: mol_type = other RNA
caaattcatatgttgaaatc

SEQ ID NO: 1225 - RNA, 20 nt, synthetic construct
  misc_feature 1..20: note = spacer sequence
  source 1..20: mol_type = other RNA
tatgttgaaatcctaacccc

SEQ ID NO: 1226 - RNA, 20 nt, synthetic construct
  misc_feature 1..20: note = spacer sequence
  source 1..20: mol_type = other RNA
acatatgaatttgggaggga

SEQ ID NO: 1227 - RNA, 20 nt, synthetic construct
  misc_feature 1..20: note = spacer sequence
  source 1..20: mol_type = other RNA
taaccccatggtgatggcat

SEQ ID NO: 1228 - RNA, 20 nt, synthetic construct
  misc_feature 1..20: note = spacer sequence
  source 1..20: mol_type = other RNA
ccatggggttaggatttcaa

SEQ ID NO: 1229 - RNA, 20 nt, synthetic construct
  misc_feature 1..20: note = spacer sequence
  source 1..20: mol_type = other RNA
attaaataatgccatcacca

SEQ ID NO: 1230 - RNA, 20 nt, synthetic construct
  misc_feature 1..20: note = spacer sequence
  source 1..20: mol_type = other RNA
cctttgttactgatctttgc

SEQ ID NO: 1231 - RNA, 20 nt, synthetic construct
  misc_feature 1..20: note = spacer sequence
  source 1..20: mol_type = other RNA
gtaacaaaggtgatgccagt

SEQ ID NO: 1232 - RNA, 20 nt, synthetic construct
  misc_feature 1..20: note = spacer sequence
  source 1..20: mol_type = other RNA
ttgcagccaagaataattat

SEQ ID NO: 1233 - RNA, 20 nt, synthetic construct
  misc_feature 1..20: note = spacer sequence
  source 1..20: mol_type = other RNA
tggctgcaaagatcagtaac

SEQ ID NO: 1234 - RNA, 20 nt, synthetic construct
  misc_feature 1..20: note = spacer sequence
  source 1..20: mol_type = other RNA
aaacaattatgtaatcttct

SEQ ID NO: 1235 - RNA, 20 nt, synthetic construct
  misc_feature 1..20: note = spacer sequence
  source 1..20: mol_type = other RNA
tcttcactttttcctttaaa

SEQ ID NO: 1236 - RNA, 20 nt, synthetic construct
  misc_feature 1..20: note = spacer sequence
  source 1..20: mol_type = other RNA
tcactttttcctttaaaaac

SEQ ID NO: 1237 - RNA, 20 nt, synthetic construct
  misc_feature 1..20: note = spacer sequence
  source 1..20: mol_type = other RNA
ctttttcctttaaaaacctt

SEQ ID NO: 1238 - RNA, 20 nt, synthetic construct
  misc_feature 1..20: note = spacer sequence
  source 1..20: mol_type = other RNA
tttaaaaacctttgttttct

SEQ ID NO: 1239 - RNA, 20 nt, synthetic construct
  misc_feature 1..20: note = spacer sequence
  source 1..20: mol_type = other RNA
tttacctccctgaatacgta

SEQ ID NO: 1240 - RNA, 20 nt, synthetic construct
  misc_feature 1..20: note = spacer sequence
  source 1..20: mol_type = other RNA
ctgaatacgtacctagttta

SEQ ID NO: 1241 - RNA, 20 nt, synthetic construct
  misc_feature 1..20: note = spacer sequence
  source 1..20: mol_type = other RNA
gggaggtaaaagaaaacaaa

SEQ ID NO: 1242 - RNA, 20 nt, synthetic construct
  misc_feature 1..20: note = spacer sequence
  source 1..20: mol_type = other RNA
tggtgcaatcttcccacctc

SEQ ID NO: 1243 - RNA, 20 nt, synthetic construct
  misc_feature 1..20: note = spacer sequence
  source 1..20: mol_type = other RNA
acctcctggtgcaatcttcc

SEQ ID NO: 1244 - RNA, 20 nt, synthetic construct
  misc_feature 1..20: note = spacer sequence
  source 1..20: mol_type = other RNA
ctgtggcctcaacctcctgg

SEQ ID NO: 1245 - RNA, 20 nt, synthetic construct
  misc_feature 1..20: note = spacer sequence
  source 1..20: mol_type = other RNA
tgatcacaccactgcattcc

SEQ ID NO: 1246 - RNA, 20 nt, synthetic construct
  misc_feature 1..20: note = spacer sequence
  source 1..20: mol_type = other RNA
agactcactgtggcctcaac

SEQ ID NO: 1247 - RNA, 20 nt, synthetic construct
  misc_feature 1..20: note = spacer sequence
  source 1..20: mol_type = other RNA
caccactgcattccagcttg

SEQ ID NO: 1248 - RNA, 20 nt, synthetic construct
  misc_feature 1..20: note = spacer sequence
  source 1..20: mol_type = other RNA
agcttgggcagcagaacgag

SEQ ID NO: 1249 - RNA, 20 nt, synthetic construct
  misc_feature 1..20: note = spacer sequence
  source 1..20: mol_type = other RNA
gctgcccaagctggaatgca

SEQ ID NO: 1250 - RNA, 20 nt, synthetic construct
  misc_feature 1..20: note = spacer sequence
  source 1..20: mol_type = other RNA
ttctgctgcccaagctggaa

SEQ ID NO: 1251 - RNA, 20 nt, synthetic construct
  misc_feature 1..20: note = spacer sequence
  source 1..20: mol_type = other RNA
cgttctgctgcccaagctgg

SEQ ID NO: 1252 - RNA, 20 nt, synthetic construct
  misc_feature 1..20: note = spacer sequence
  source 1..20: mol_type = other RNA
cgctctcgttctgctgccca

SEQ ID NO: 1253 - RNA, 20 nt, synthetic construct
  misc_feature 1..20: note = spacer sequence
  source 1..20: mol_type = other RNA
atgtaagttacagcgcaaca

SEQ ID NO: 1254 - RNA, 20 nt, synthetic construct
  misc_feature 1..20: note = spacer sequence
  source 1..20: mol_type = other RNA
tgcgtgtggggaaagatgac

SEQ ID NO: 1255 - RNA, 20 nt, synthetic construct
  misc_feature 1..20: note = spacer sequence
  source 1..20: mol_type = other RNA
ccacacgcaagagttttaat

SEQ ID NO: 1256 - RNA, 20 nt, synthetic construct
  misc_feature 1..20: note = spacer sequence
  source 1..20: mol_type = other RNA
ttccccacacgcaagagttt

SEQ ID NO: 1257 - RNA, 20 nt, synthetic construct
  misc_feature 1..20: note = spacer sequence
  source 1..20: mol_type = other RNA
tctttccccacacgcaagag

SEQ ID NO: 1258 - RNA, 20 nt, synthetic construct
  misc_feature 1..20: note = spacer sequence
  source 1..20: mol_type = other RNA
atatggccaactacacctgc

SEQ ID NO: 1259 - RNA, 20 nt, synthetic construct
  misc_feature 1..20: note = spacer sequence
  source 1..20: mol_type = other RNA
gatgagttttgtaattcagt

SEQ ID NO: 1260 - RNA, 20 nt, synthetic construct
  misc_feature 1..20: note = spacer sequence
  source 1..20: mol_type = other RNA
gaacactattttccatatgg

SEQ ID NO: 1261 - RNA, 20 nt, synthetic construct
  misc_feature 1..20: note = spacer sequence
  source 1..20: mol_type = other RNA
tctgaacactattttccata

SEQ ID NO: 1262 - RNA, 20 nt, synthetic construct
  misc_feature 1..20: note = spacer sequence
  source 1..20: mol_type = other RNA
gttggagaatttggcaagaa

SEQ ID NO: 1263 - RNA, 20 nt, synthetic construct
  misc_feature 1..20: note = spacer sequence
  source 1..20: mol_type = other RNA
aactgaattacaaaactcat

SEQ ID NO: 1264 - RNA, 20 nt, synthetic construct
  misc_feature 1..20: note = spacer sequence
  source 1..20: mol_type = other RNA
ccaactgaattacaaaactc

SEQ ID NO: 1265 - RNA, 20 nt, synthetic construct
  misc_feature 1..20: note = spacer sequence
  source 1..20: mol_type = other RNA
tgccaaattctccaactgaa

SEQ ID NO: 1266 - RNA, 20 nt, synthetic construct
  misc_feature 1..20: note = spacer sequence
  source 1..20: mol_type = other RNA
aaactagtatcctcaatttt

SEQ ID NO: 1267 - RNA, 20 nt, synthetic construct
  misc_feature 1..20: note = spacer sequence
  source 1..20: mol_type = other RNA
tcaattttctatatcttctc

SEQ ID NO: 1268 - RNA, 20 nt, synthetic construct
  misc_feature 1..20: note = spacer sequence
  source 1..20: mol_type = other RNA
attttctatatcttctctgc

SEQ ID NO: 1269 - RNA, 20 nt, synthetic construct
  misc_feature 1..20: note = spacer sequence
  source 1..20: mol_type = other RNA
atatcttctctgccacattt

SEQ ID NO: 1270 - RNA, 20 nt, synthetic construct
  misc_feature 1..20: note = spacer sequence
  source 1..20: mol_type = other RNA
tctctgccacatttggcaga

SEQ ID NO: 1271 - RNA, 20 nt, synthetic construct
  misc_feature 1..20: note = spacer sequence
  source 1..20: mol_type = other RNA
ctgccacatttggcagaaga

SEQ ID NO: 1272 - RNA, 20 nt, synthetic construct
  misc_feature 1..20: note = spacer sequence
  source 1..20: mol_type = other RNA
gccacatttggcagaagaaa

SEQ ID NO: 1273 - RNA, 20 nt, synthetic construct
  misc_feature 1..20: note = spacer sequence
  source 1..20: mol_type = other RNA
gccaaatgtggcagagaaga

SEQ ID NO: 1274 - RNA, 20 nt, synthetic construct
  misc_feature 1..20: note = spacer sequence
  source 1..20: mol_type = other RNA
tctgccaaatgtggcagaga

SEQ ID NO: 1275 - RNA, 20 nt, synthetic construct
  misc_feature 1..20: note = spacer sequence
  source 1..20: mol_type = other RNA
ttttcttctgccaaatgtgg

SEQ ID NO: 1276 - RNA, 20 nt, synthetic construct
  misc_feature 1..20: note = spacer sequence
  source 1..20: mol_type = other RNA
ctttttcttctgccaaatgt

SEQ ID NO: 1277 - RNA, 20 nt, synthetic construct
  misc_feature 1..20: note = spacer sequence
  source 1..20: mol_type = other RNA
ctctttttcttctgccaaat

SEQ ID NO: 1278 - RNA, 20 nt, synthetic construct
  misc_feature 1..20: note = spacer sequence
  source 1..20: mol_type = other RNA
aagtatctctctttttcttc

SEQ ID NO: 1279 - RNA, 20 nt, synthetic construct
  misc_feature 1..20: note = spacer sequence
  source 1..20: mol_type = other RNA
tttctaagtatctctctttt

SEQ ID NO: 1280 - RNA, 20 nt, synthetic construct
  misc_feature 1..20: note = spacer sequence
  source 1..20: mol_type = other RNA
atatcttttctaagtatctc

SEQ ID NO: 1281 - RNA, 20 nt, synthetic construct
  misc_feature 1..20: note = spacer sequence
  source 1..20: mol_type = other RNA
gttttctatatcttttctaa

SEQ ID NO: 1282 - RNA, 20 nt, synthetic construct
  misc_feature 1..20: note = spacer sequence
  source 1..20: mol_type = other RNA
aaactagtaccctcagtttt

SEQ ID NO: 1283 - RNA, 20 nt, synthetic construct
  misc_feature 1..20: note = spacer sequence
  source 1..20: mol_type = other RNA
gttttttaatagcagtttaa

SEQ ID NO: 1284 - RNA, 20 nt, synthetic construct
  misc_feature 1..20: note = spacer sequence
  source 1..20: mol_type = other RNA
gcctgatttagccagaataa

SEQ ID NO: 1285 - RNA, 20 nt, synthetic construct
  misc_feature 1..20: note = spacer sequence
  source 1..20: mol_type = other RNA
ggcagatataactacacaca

SEQ ID NO: 1286 - RNA, 20 nt, synthetic construct
  misc_feature 1..20: note = spacer sequence
  source 1..20: mol_type = other RNA
ggctaaatcaggcagatata

SEQ ID NO: 1287 - RNA, 20 nt, synthetic construct
  misc_feature 1..20: note = spacer sequence
  source 1..20: mol_type = other RNA
gagaggcctccctggaggag

SEQ ID NO: 1288 - RNA, 20 nt, synthetic construct
  misc_feature 1..20: note = spacer sequence
  source 1..20: mol_type = other RNA
gacttattctggctaaatca

SEQ ID NO: 1289 - RNA, 20 nt, synthetic construct
  misc_feature 1..20: note = spacer sequence
  source 1..20: mol_type = other RNA
ctgacttattctggctaaat

SEQ ID NO: 1290 - RNA, 20 nt, synthetic construct
  misc_feature 1..20: note = spacer sequence
  source 1..20: mol_type = other RNA
ctggaggaggcagcatcaga

SEQ ID NO: 1291 - RNA, 20 nt, synthetic construct
  misc_feature 1..20: note = spacer sequence
  source 1..20: mol_type = other RNA
agggaggcctctctgactta

SEQ ID NO: 1292 - RNA, 20 nt, synthetic construct
  misc_feature 1..20: note = spacer sequence
  source 1..20: mol_type = other RNA
tccagggaggcctctctgac

SEQ ID NO: 1293 - RNA, 20 nt, synthetic construct
  misc_feature 1..20: note = spacer sequence
  source 1..20: mol_type = other RNA
gagttgggactgtagagggt

SEQ ID NO: 1294 - RNA, 20 nt, synthetic construct
  misc_feature 1..20: note = spacer sequence
  source 1..20: mol_type = other RNA
gatgctgcctcctccaggga

SEQ ID NO: 1295 - RNA, 20 nt, synthetic construct
  misc_feature 1..20: note = spacer sequence
  source 1..20: mol_type = other RNA
caactctgatgctgcctcct

SEQ ID NO: 1296 - RNA, 20 nt, synthetic construct
  misc_feature 1..20: note = spacer sequence
  source 1..20: mol_type = other RNA
acagtcccaactctgatgct

SEQ ID NO: 1297 - RNA, 20 nt, synthetic construct
  misc_feature 1..20: note = spacer sequence
  source 1..20: mol_type = other RNA
agttgggggacctctctgag

SEQ ID NO: 1298 - RNA, 20 nt, synthetic construct
  misc_feature 1..20: note = spacer sequence
  source 1..20: mol_type = other RNA
gtggagctgggattagaact

SEQ ID NO: 1299 - RNA, 20 nt, synthetic construct
  misc_feature 1..20: note = spacer sequence
  source 1..20: mol_type = other RNA
actgatatctagttggggga

SEQ ID NO: 1300 - RNA, 20 nt, synthetic construct
  misc_feature 1..20: note = spacer sequence
  source 1..20: mol_type = other RNA
cagctccactgatatctagt

SEQ ID NO: 1301 - RNA, 20 nt, synthetic construct
  misc_feature 1..20: note = spacer sequence
  source 1..20: mol_type = other RNA
aatcccagctccactgatat

SEQ ID NO: 1302 - RNA, 20 nt, synthetic construct
  misc_feature 1..20: note = spacer sequence
  source 1..20: mol_type = other RNA
cctgacttccaaattacctc

SEQ ID NO: 1303 - RNA, 20 nt, synthetic construct
  misc_feature 1..20: note = spacer sequence
  source 1..20: mol_type = other RNA
tgacttccaaattacctcat

SEQ ID NO: 1304 - RNA, 20 nt, synthetic construct
  misc_feature 1..20: note = spacer sequence
  source 1..20: mol_type = other RNA
ggagacccagttctaatccc

SEQ ID NO: 1305 - RNA, 20 nt, synthetic construct
  misc_feature 1..20: note = spacer sequence
  source 1..20: mol_type = other RNA
aaattacctcattaaacagg

SEQ ID NO: 1306 - RNA, 20 nt, synthetic construct
  misc_feature 1..20: note = spacer sequence
  source 1..20: mol_type = other RNA
ttaaacagggatgccaggtt

SEQ ID NO: 1307 - RNA, 20 nt, synthetic construct
  misc_feature 1..20: note = spacer sequence
  source 1..20: mol_type = other RNA
ctgtttaatgaggtaatttg

SEQ ID NO: 1308 - RNA, 20 nt, synthetic construct
  misc_feature 1..20: note = spacer sequence
  source 1..20: mol_type = other RNA
gcattgtgggaactaaacat

SEQ ID NO: 1309 - RNA, 20 nt, synthetic construct
  misc_feature 1..20: note = spacer sequence
  source 1..20: mol_type = other RNA
cacaatgctgagttgagagt

SEQ ID NO: 1310 - RNA, 20 nt, synthetic construct
  misc_feature 1..20: note = spacer sequence
  source 1..20: mol_type = other RNA
caatcagcttcaggagcctc

SEQ ID NO: 1311 - RNA, 20 nt, synthetic construct
  misc_feature 1..20: note = spacer sequence
  source 1..20: mol_type = other RNA
gcttcaggagcctcactgtt

SEQ ID NO: 1312 - RNA, 20 nt, synthetic construct
  misc_feature 1..20: note = spacer sequence
  source 1..20: mol_type = other RNA
ggagcctcactgttgccatg

SEQ ID NO: 1313 - RNA, 20 nt, synthetic construct
  misc_feature 1..20: note = spacer sequence
  source 1..20: mol_type = other RNA
tgaagctgattgtgatgttt

SEQ ID NO: 1314 - RNA, 20 nt, synthetic construct
  misc_feature 1..20: note = spacer sequence
  source 1..20: mol_type = other RNA
ctgttgccatgggttacatg

SEQ ID NO: 1315 - RNA, 20 nt, synthetic construct
  misc_feature 1..20: note = spacer sequence
  source 1..20: mol_type = other RNA
tgtaacccatggcaacagtg

SEQ ID NO: 1316 - RNA, 20 nt, synthetic construct
  misc_feature 1..20: note = spacer sequence
  source 1..20: mol_type = other RNA
aatctaaggatggaaccaaa

SEQ ID NO: 1317 - RNA, 20 nt, synthetic construct
  misc_feature 1..20: note = spacer sequence
  source 1..20: mol_type = other RNA
aaggatggaaccaaaacagg

SEQ ID NO: 1318 - RNA, 20 nt, synthetic construct
  misc_feature 1..20: note = spacer sequence
  source 1..20: mol_type = other RNA
ttagatttgaattcatgtaa

SEQ ID NO: 1319 - RNA, 20 nt, synthetic construct
  misc_feature 1..20: note = spacer sequence
  source 1..20: mol_type = other RNA
atccttagatttgaattcat

SEQ ID NO: 1320 - RNA, 20 nt, synthetic construct
  misc_feature 1..20: note = spacer sequence
  source 1..20: mol_type = other RNA
gccctcgagtgggaggtgaa

SEQ ID NO: 1321 - RNA, 20 nt, synthetic construct
  misc_feature 1..20: note = spacer sequence
  source 1..20: mol_type = other RNA
agtgggaggtgaaatgaagt

SEQ ID NO: 1322 - RNA, 20 nt, synthetic construct
  misc_feature 1..20: note = spacer sequence
  source 1..20: mol_type = other RNA
agggctgatatttaagggcc

SEQ ID NO: 1323 - RNA, 20 nt, synthetic construct
  misc_feature 1..20: note = spacer sequence
  source 1..20: mol_type = other RNA
cactcgagggctgatattta

SEQ ID NO: 1324 - RNA, 20 nt, synthetic construct
  misc_feature 1..20: note = spacer sequence
  source 1..20: mol_type = other RNA
cctcccactcgagggctgat

SEQ ID NO: 1325 - RNA, 20 nt, synthetic construct
  misc_feature 1..20: note = spacer sequence
  source 1..20: mol_type = other RNA
tttcacctcccactcgaggg

SEQ ID NO: 1326 - RNA, 20 nt, synthetic construct
  misc_feature 1..20: note = spacer sequence
  source 1..20: mol_type = other RNA
aacaccttaaaggaaaacag

SEQ ID NO: 1327 - RNA, 20 nt, synthetic construct
  misc_feature 1..20: note = spacer sequence
  source 1..20: mol_type = other RNA
tttaaggtgttagagcactt

SEQ ID NO: 1328 - RNA, 20 nt, synthetic construct
  misc_feature 1..20: note = spacer sequence
  source 1..20: mol_type = other RNA
tgttttcctttaaggtgtta

SEQ ID NO: 1329 - RNA, 20 nt, synthetic construct
  misc_feature 1..20: note = spacer sequence
  source 1..20: mol_type = other RNA
cctgttttcctttaaggtgt

SEQ ID NO: 1330 - RNA, 20 nt, synthetic construct
  misc_feature 1..20: note = spacer sequence
  source 1..20: mol_type = other RNA
tgctgtagcgggacccaccc

SEQ ID NO: 1331 - RNA, 20 nt, synthetic construct
  misc_feature 1..20: note = spacer sequence
  source 1..20: mol_type = other RNA
aggcagcaaccacccatcct

SEQ ID NO: 1332 - RNA, 20 nt, synthetic construct
  misc_feature 1..20: note = spacer sequence
  source 1..20: mol_type = other RNA
atttgttaacagctgctaaa

SEQ ID NO: 1333 - RNA, 20 nt, synthetic construct
  misc_feature 1..20: note = spacer sequence
  source 1..20: mol_type = other RNA
aggctccaggcagcaaccac

SEQ ID NO: 1334 - RNA, 20 nt, synthetic construct
  misc_feature 1..20: note = spacer sequence
  source 1..20: mol_type = other RNA
ctgtgtatagggcttgcaag

SEQ ID NO: 1335 - RNA, 20 nt, synthetic construct
  misc_feature 1..20: note = spacer sequence
  source 1..20: mol_type = other RNA
gtgtatagggcttgcaagtc

SEQ ID NO: 1336 - RNA, 20 nt, synthetic construct
  misc_feature 1..20: note = spacer sequence
  source 1..20: mol_type = other RNA
tggcggatacccagagaaat

SEQ ID NO: 1337 - RNA, 20 nt, synthetic construct
  misc_feature 1..20: note = spacer sequence
  source 1..20: mol_type = other RNA
gccaagacttgcaagcccta

SEQ ID NO: 1338 - RNA, 20 nt, synthetic construct
  misc_feature 1..20: note = spacer sequence
  source 1..20: mol_type = other RNA
gggtatccgccaagacttgc

SEQ ID NO: 1339 - RNA, 20 nt, synthetic construct
  misc_feature 1..20: note = spacer sequence
  source 1..20: mol_type = other RNA
ctgggtatccgccaagactt

SEQ ID NO: 1340 - RNA, 20 nt, synthetic construct
  misc_feature 1..20: note = spacer sequence
  source 1..20: mol_type = other RNA
tatttctctgggtatccgcc

SEQ ID NO: 1341 - RNA, 20 nt, synthetic construct
  misc_feature 1..20: note = spacer sequence
  source 1..20: mol_type = other RNA
ttcttatttctctgggtatc

SEQ ID NO: 1342 - RNA, 20 nt, synthetic construct
  misc_feature 1..20: note = spacer sequence
  source 1..20: mol_type = other RNA
gaaactagacctgcgccgtc

SEQ ID NO: 1343 - RNA, 20 nt, synthetic construct
  misc_feature 1..20: note = spacer sequence
  source 1..20: mol_type = other RNA
gacattcgttcttatttctc

SEQ ID NO: 1344 - RNA, 20 nt, synthetic construct
  misc_feature 1..20: note = spacer sequence
  source 1..20: mol_type = other RNA
gtgctaataacaatacctac

SEQ ID NO: 1345 - RNA, 20 nt, synthetic construct
  misc_feature 1..20: note = spacer sequence
  source 1..20: mol_type = other RNA
ctgtgctaataacaatacct

SEQ ID NO: 1346 - RNA, 20 nt, synthetic construct
  misc_feature 1..20: note = spacer sequence
  source 1..20: mol_type = other RNA
acctctctgtgctaataaca

SEQ ID NO: 1347 - RNA, 20 nt, synthetic construct
  misc_feature 1..20: note = spacer sequence
  source 1..20: mol_type = other RNA
cacagctagtaaatagaaaa

SEQ ID NO: 1348 - RNA, 20 nt, synthetic construct
  misc_feature 1..20: note = spacer sequence
  source 1..20: mol_type = other RNA
atttactagctgtgtgactt

SEQ ID NO: 1349 - RNA, 20 nt, synthetic construct
  misc_feature 1..20: note = spacer sequence
  source 1..20: mol_type = other RNA
tagtttttctatttactagc

SEQ ID NO: 1350 - RNA, 20 nt, synthetic construct
  misc_feature 1..20: note = spacer sequence
  source 1..20: mol_type = other RNA
aaccccaggaagtctgtctc

SEQ ID NO: 1351 - RNA, 20 nt, synthetic construct
  misc_feature 1..20: note = spacer sequence
  source 1..20: mol_type = other RNA
gtgtgtgttggagcaggaga

SEQ ID NO: 1352 - RNA, 20 nt, synthetic construct
  misc_feature 1..20: note = spacer sequence
  source 1..20: mol_type = other RNA
tcagtgtgtgttggagcagg

SEQ ID NO: 1353 - RNA, 20 nt, synthetic construct
  misc_feature 1..20: note = spacer sequence
  source 1..20: mol_type = other RNA
gcacacggcaagccaggagg

SEQ ID NO: 1354 - RNA, 20 nt, synthetic construct
  misc_feature 1..20: note = spacer sequence
  source 1..20: mol_type = other RNA
tggcttgccgtgtgctgatg

SEQ ID NO: 1355 - RNA, 20 nt, synthetic construct
  misc_feature 1..20: note = spacer sequence
  source 1..20: mol_type = other RNA
tcctggcttgccgtgtgctg

SEQ ID NO: 1356 - RNA, 20 nt, synthetic construct
  misc_feature 1..20: note = spacer sequence
  source 1..20: mol_type = other RNA
ggtgggggcactcctcctgg

SEQ ID NO: 1357 - RNA, 20 nt, synthetic construct
  misc_feature 1..20: note = spacer sequence
  source 1..20: mol_type = other RNA
ggttctggtgggggcactcc

SEQ ID NO: 1358 - RNA, 20 nt, synthetic construct
  misc_feature 1..20: note = spacer sequence
  source 1..20: mol_type = other RNA
gggtgccagcatggtcaggt

SEQ ID NO: 1359 - RNA, 20 nt, synthetic construct
  misc_feature 1..20: note = spacer sequence
  source 1..20: mol_type = other RNA
cagacttccagcctccagaa

SEQ ID NO: 1360 - RNA, 20 nt, synthetic construct
  misc_feature 1..20: note = spacer sequence
  source 1..20: mol_type = other RNA
gcgatcagggtgccagcatg

SEQ ID NO: 1361 - RNA, 20 nt, synthetic construct
  misc_feature 1..20: note = spacer sequence
  source 1..20: mol_type = other RNA
agcctccagaactgtgacaa

SEQ ID NO: 1362 - RNA, 20 nt, synthetic construct
  misc_feature 1..20: note = spacer sequence
  source 1..20: mol_type = other RNA
agtggcagaggacaaaggaa

SEQ ID NO: 1363 - RNA, 20 nt, synthetic construct
  misc_feature 1..20: note = spacer sequence
  source 1..20: mol_type = other RNA
gccacttgaagtctctataa

SEQ ID NO: 1364 - RNA, 20 nt, synthetic construct
  misc_feature 1..20: note = spacer sequence
  source 1..20: mol_type = other RNA
tctgccacttgaagtctcta

SEQ ID NO: 1365 - RNA, 20 nt, synthetic construct
  misc_feature 1..20: note = spacer sequence
  source 1..20: mol_type = other RNA
tttgtcctctgccacttgaa

SEQ ID NO: 1366 - RNA, 20 nt, synthetic construct
  misc_feature 1..20: note = spacer sequence
  source 1..20: mol_type = other RNA
ttcctttgtcctctgccact

SEQ ID NO: 1367 - RNA, 20 nt, synthetic construct
  misc_feature 1..20: note = spacer sequence
  source 1..20: mol_type = other RNA
cggctatgtcattcctttgt

SEQ ID NO: 1368 - RNA, 20 nt, synthetic construct
  misc_feature 1..20: note = spacer sequence
  source 1..20: mol_type = other RNA
cctcccggctatgtcattcc

SEQ ID NO: 1369 - RNA, 20 nt, synthetic construct
  misc_feature 1..20: note = spacer sequence
  source 1..20: mol_type = other RNA
ctgtcccctcccggctatgt

SEQ ID NO: 1370 - RNA, 20 nt, synthetic construct
  misc_feature 1..20: note = spacer sequence
  source 1..20: mol_type = other RNA
gcccagcatccctgtcccct

SEQ ID NO: 1371 - RNA, 20 nt, synthetic construct
  misc_feature 1..20: note = spacer sequence
  source 1..20: mol_type = other RNA
tcagcccagcatccctgtcc

SEQ ID NO: 1372 - RNA, 20 nt, synthetic construct
  misc_feature 1..20: note = spacer sequence
  source 1..20: mol_type = other RNA
tcttcagcccagcatccctg

SEQ ID NO: 1373 - RNA, 20 nt, synthetic construct
  misc_feature 1..20: note = spacer sequence
  source 1..20: mol_type = other RNA
ctcatcttcagcccagcatc

SEQ ID NO: 1374 - RNA, 20 nt, synthetic construct
  misc_feature 1..20: note = spacer sequence
  source 1..20: mol_type = other RNA
atatgcagcatgctccctct

SEQ ID NO: 1375 - RNA, 20 nt, synthetic construct
  misc_feature 1..20: note = spacer sequence
  source 1..20: mol_type = other RNA
caactgtgctttgtttattg

SEQ ID NO: 1376 - RNA, 20 nt, synthetic construct
  misc_feature 1..20: note = spacer sequence
  source 1..20: mol_type = other RNA
gccaataaacaaagcacagt

SEQ ID NO: 1377 - RNA, 20 nt, synthetic construct
  misc_feature 1..20: note = spacer sequence
  source 1..20: mol_type = other RNA
tttctgccaataaacaaagc

SEQ ID NO: 1378 - RNA, 20 nt, synthetic construct
  misc_feature 1..20: note = spacer sequence
  source 1..20: mol_type = other RNA
aacttcatttctgccaataa

SEQ ID NO: 1379 - RNA, 20 nt, synthetic construct
  misc_feature 1..20: note = spacer sequence
  source 1..20: mol_type = other RNA
ccatcccctgggcagcagca

SEQ ID NO: 1380 - RNA, 20 nt, synthetic construct
  misc_feature 1..20: note = spacer sequence
  source 1..20: mol_type = other RNA
atgccttgcatttgcagttg

SEQ ID NO: 1381 - RNA, 20 nt, synthetic construct
  misc_feature 1..20: note = spacer sequence
  source 1..20: mol_type = other RNA
aggttgcacactccttatga

SEQ ID NO: 1382 - RNA, 20 nt, synthetic construct
  misc_feature 1..20: note = spacer sequence
  source 1..20: mol_type = other RNA
ttatgagaacctaatgcctg

SEQ ID NO: 1383 - RNA, 20 nt, synthetic construct
  misc_feature 1..20: note = spacer sequence
  source 1..20: mol_type = other RNA
taaggagtgtgcaacctaga

SEQ ID NO: 1384 - RNA, 20 nt, synthetic construct
  misc_feature 1..20: note = spacer sequence
  source 1..20: mol_type = other RNA
cataaggagtgtgcaaccta

SEQ ID NO: 1385 - RNA, 20 nt, synthetic construct
  misc_feature 1..20: note = spacer sequence
  source 1..20: mol_type = other RNA
ggcattaggttctcataagg

SEQ ID NO: 1386 - RNA, 20 nt, synthetic construct
  misc_feature 1..20: note = spacer sequence
  source 1..20: mol_type = other RNA
tcaggcattaggttctcata

SEQ ID NO: 1387 - RNA, 20 nt, synthetic construct
  misc_feature 1..20: note = spacer sequence
  source 1..20: mol_type = other RNA
gtcactgtctcccatgaccc

SEQ ID NO: 1388 - RNA, 20 nt, synthetic construct
  misc_feature 1..20: note = spacer sequence
  source 1..20: mol_type = other RNA
ctgtctcccatgacccccag

SEQ ID NO: 1389 - RNA, 20 nt, synthetic construct
  misc_feature 1..20: note = spacer sequence
  source 1..20: mol_type = other RNA
cccatgacccccagatggga

SEQ ID NO: 1390 - RNA, 20 nt, synthetic construct
  misc_feature 1..20: note = spacer sequence
  source 1..20: mol_type = other RNA
catgacccccagatgggacc

SEQ ID NO: 1391 - RNA, 20 nt, synthetic construct
  misc_feature 1..20: note = spacer sequence
  source 1..20: mol_type = other RNA
tgggagacagtgacagatca

SEQ ID NO: 1392 - RNA, 20 nt, synthetic construct
  misc_feature 1..20: note = spacer sequence
  source 1..20: mol_type = other RNA
gggggtcatgggagacagtg

SEQ ID NO: 1393 - RNA, 20 nt, synthetic construct
  misc_feature 1..20: note = spacer sequence
  source 1..20: mol_type = other RNA
catctgggggtcatgggaga

SEQ ID NO: 1394 - RNA, 20 nt, synthetic construct
  misc_feature 1..20: note = spacer sequence
  source 1..20: mol_type = other RNA
ggaagacaagctcagggatc

SEQ ID NO: 1395 - RNA, 20 nt, synthetic construct
  misc_feature 1..20: note = spacer sequence
  source 1..20: mol_type = other RNA
tgaaactaggtggtcccatc

SEQ ID NO: 1396 - RNA, 20 nt, synthetic construct
  misc_feature 1..20: note = spacer sequence
  source 1..20: mol_type = other RNA
aatcatcccaaaaccatccc

SEQ ID NO: 1397 - RNA, 20 nt, synthetic construct
  misc_feature 1..20: note = spacer sequence
  source 1..20: mol_type = other RNA
tcccaaaaccatccctccca

SEQ ID NO: 1398 - RNA, 20 nt, synthetic construct
  misc_feature 1..20: note = spacer sequence
  source 1..20: mol_type = other RNA
caaaaccatccctcccaccc

SEQ ID NO: 1399 - RNA, 20 nt, synthetic construct
  misc_feature 1..20: note = spacer sequence
  source 1..20: mol_type = other RNA
ctcccacccccatgtatgga

SEQ ID NO: 1400 - RNA, 20 nt, synthetic construct
  misc_feature 1..20: note = spacer sequence
  source 1..20: mol_type = other RNA
cacccccatgtatggaaaaa

SEQ ID NO: 1401 - RNA, 20 nt, synthetic construct
  misc_feature 1..20: note = spacer sequence
  source 1..20: mol_type = other RNA
atacatgggggtgggaggga

SEQ ID NO: 1402 - RNA, 20 nt, synthetic construct
  misc_feature 1..20: note = spacer sequence
  source 1..20: mol_type = other RNA
cccatgaaactggtccctgg

SEQ ID NO: 1403 - RNA, 20 nt, synthetic construct
  misc_feature 1..20: note = spacer sequence
  source 1..20: mol_type = other RNA
catgaaactggtccctggtg

SEQ ID NO: 1404 - RNA, 20 nt, synthetic construct
  misc_feature 1..20: note = spacer sequence
  source 1..20: mol_type = other RNA
tgggagacaatttttccata

SEQ ID NO: 1405 - RNA, 20 nt, synthetic construct
  misc_feature 1..20: note = spacer sequence
  source 1..20: mol_type = other RNA
ctggtgcctaaaaggttggg

SEQ ID NO: 1406 - RNA, 20 nt, synthetic construct
  misc_feature 1..20: note = spacer sequence
  source 1..20: mol_type = other RNA
ccaaccttttaggcaccagg

SEQ ID NO: 1407 - RNA, 20 nt, synthetic construct
  misc_feature 1..20: note = spacer sequence
  source 1..20: mol_type = other RNA
tgtttaaactaatggtcccc

SEQ ID NO: 1408 - RNA, 20 nt, synthetic construct
  misc_feature 1..20: note = spacer sequence
  source 1..20: mol_type = other RNA
aagagaatcaaagcacatca

SEQ ID NO: 1409 - RNA, 20 nt, synthetic construct
  misc_feature 1..20: note = spacer sequence
  source 1..20: mol_type = other RNA
agtgcagatcccagagctgg

SEQ ID NO: 1410 - RNA, 20 nt, synthetic construct
  misc_feature 1..20: note = spacer sequence
  source 1..20: mol_type = other RNA
gcactggagccacttgggtt

SEQ ID NO: 1411 - RNA, 20 nt, synthetic construct
  misc_feature 1..20: note = spacer sequence
  source 1..20: mol_type = other RNA
cagagctggcacttaaaagc

SEQ ID NO: 1412 - RNA, 20 nt, synthetic construct
  misc_feature 1..20: note = spacer sequence
  source 1..20: mol_type = other RNA
gggatctgcactggagccac

SEQ ID NO: 1413 - RNA, 20 nt, synthetic construct
  misc_feature 1..20: note = spacer sequence
  source 1..20: mol_type = other RNA
acagcttttaagtgccagct

SEQ ID NO: 1414 - RNA, 20 nt, synthetic construct
  misc_feature 1..20: note = spacer sequence
  source 1..20: mol_type = other RNA
cacctgtaatcccagcactt

SEQ ID NO: 1415 - RNA, 20 nt, synthetic construct
  misc_feature 1..20: note = spacer sequence
  source 1..20: mol_type = other RNA
ctccctccctttctcccttc

SEQ ID NO: 1416 - RNA, 20 nt, synthetic construct
  misc_feature 1..20: note = spacer sequence
  source 1..20: mol_type = other RNA
ctccctttctcccttccttc

SEQ ID NO: 1417 - RNA, 20 nt, synthetic construct
  misc_feature 1..20: note = spacer sequence
  source 1..20: mol_type = other RNA
ctttctcccttccttccttt

SEQ ID NO: 1418 - RNA, 20 nt, synthetic construct
  misc_feature 1..20: note = spacer sequence
  source 1..20: mol_type = other RNA
cccttccttcctttccttct

SEQ ID NO: 1419 - RNA, 20 nt, synthetic construct
  misc_feature 1..20: note = spacer sequence
  source 1..20: mol_type = other RNA
cttccttcctttccttcttt

SEQ ID NO: 1420 - RNA, 20 nt, synthetic construct
  misc_feature 1..20: note = spacer sequence
  source 1..20: mol_type = other RNA
ttcctttccttctttctttc

SEQ ID NO: 1421 - RNA, 20 nt, synthetic construct
  misc_feature 1..20: note = spacer sequence
  source 1..20: mol_type = other RNA
tttccttctttctttctttt

SEQ ID NO: 1422 - RNA, 20 nt, synthetic construct
  misc_feature 1..20: note = spacer sequence
  source 1..20: mol_type = other RNA
ttctttctttcttttgagac

SEQ ID NO: 1423 - RNA, 20 nt, synthetic construct
  misc_feature 1..20: note = spacer sequence
  source 1..20: mol_type = other RNA
ttctttcttttgagacagga

SEQ ID NO: 1424 - RNA, 20 nt, synthetic construct
  misc_feature 1..20: note = spacer sequence
  source 1..20: mol_type = other RNA
ttcttttgagacaggatctt

SEQ ID NO: 1425 - RNA, 20 nt, synthetic construct
  misc_feature 1..20: note = spacer sequence
  source 1..20: mol_type = other RNA
tttgagacaggatcttgctc

SEQ ID NO: 1426 - RNA, 20 nt, synthetic construct
  misc_feature 1..20: note = spacer sequence
  source 1..20: mol_type = other RNA
aaagaaagaaagaaggaaag

SEQ ID NO: 1427 - RNA, 20 nt, synthetic construct
  misc_feature 1..20: note = spacer sequence
  source 1..20: mol_type = other RNA
caaaagaaagaaagaaggaa

SEQ ID NO: 1428 - RNA, 20 nt, synthetic construct
  misc_feature 1..20: note = spacer sequence
  source 1..20: mol_type = other RNA
tgtctcaaaagaaagaaaga

SEQ ID NO: 1429 - RNA, 20 nt, synthetic construct
  misc_feature 1..20: note = spacer sequence
  source 1..20: mol_type = other RNA
tgctctgttgcccagattgg

SEQ ID NO: 1430 - RNA, 20 nt, synthetic construct
  misc_feature 1..20: note = spacer sequence
  source 1..20: mol_type = other RNA
gttgcccagattggagtgca

SEQ ID NO: 1431 - RNA, 20 nt, synthetic construct
  misc_feature 1..20: note = spacer sequence
  source 1..20: mol_type = other RNA
gggcaacagagcaagatcct

SEQ ID NO: 1432 - RNA, 20 nt, synthetic construct
  misc_feature 1..20: note = spacer sequence
  source 1..20: mol_type = other RNA
aatctgggcaacagagcaag

SEQ ID NO: 1433 - RNA, 20 nt, synthetic construct
  misc_feature 1..20: note = spacer sequence
  source 1..20: mol_type = other RNA
tgcactccaatctgggcaac

SEQ ID NO: 1434 - RNA, 20 nt, synthetic construct
  misc_feature 1..20: note = spacer sequence
  source 1..20: mol_type = other RNA
tagctcactgcttgaactcc

SEQ ID NO: 1435 - RNA, 20 nt, synthetic construct
  misc_feature 1..20: note = spacer sequence
  source 1..20: mol_type = other RNA
ctgcttgaactcctgggctg

SEQ ID NO: 1436 - RNA, 20 nt, synthetic construct
  misc_feature 1..20: note = spacer sequence
  source 1..20: mol_type = other RNA
caactcaatttggagaggaa

SEQ ID NO: 1437 - RNA, 20 nt, synthetic construct
  misc_feature 1..20: note = spacer sequence
  source 1..20: mol_type = other RNA
gcatttgtttcacaactcaa

SEQ ID NO: 1438 - RNA, 20 nt, synthetic construct
  misc_feature 1..20: note = spacer sequence
  source 1..20: mol_type = other RNA
ttgtttctgcatttgtttca

SEQ ID NO: 1439 - RNA, 20 nt, synthetic construct
  misc_feature 1..20: note = spacer sequence
  source 1..20: mol_type = other RNA
aaggtcaaacaattcaaggc

SEQ ID NO: 1440 - RNA, 20 nt, synthetic construct
  misc_feature 1..20: note = spacer sequence
  source 1..20: mol_type = other RNA
aacaattcaaggcaaagttt

SEQ ID NO: 1441 - RNA, 20 nt, synthetic construct
  misc_feature 1..20: note = spacer sequence
  source 1..20: mol_type = other RNA
aggcaaagtttacaaccatg

SEQ ID NO: 1442 - RNA, 20 nt, synthetic construct
  misc_feature 1..20: note = spacer sequence
  source 1..20: mol_type = other RNA
atggttgtaaactttgcctt

SEQ ID NO: 1443 - RNA, 20 nt, synthetic construct
  misc_feature 1..20: note = spacer sequence
  source 1..20: mol_type = other RNA
tgggtttaatgaatcagtag

SEQ ID NO: 1444 - RNA, 20 nt, synthetic construct
  misc_feature 1..20: note = spacer sequence
  source 1..20: mol_type = other RNA
ttaaacccaggactggctgg

SEQ ID NO: 1445 - RNA, 20 nt, synthetic construct
  misc_feature 1..20: note = spacer sequence
  source 1..20: mol_type = other RNA
gtaggatcctaaatgaaatt

SEQ ID NO: 1446 - RNA, 20 nt, synthetic construct
  misc_feature 1..20: note = spacer sequence
  source 1..20: mol_type = other RNA
tactgattcattaaacccag

SEQ ID NO: 1447 - RNA, 20 nt, synthetic construct
  misc_feature 1..20: note = spacer sequence
  source 1..20: mol_type = other RNA
taaatgaaattggtaaatga

SEQ ID NO: 1448 - RNA, 20 nt, synthetic construct
  misc_feature 1..20: note = spacer sequence
  source 1..20: mol_type = other RNA
tttaggatcctactgattca

SEQ ID NO: 1449 - RNA, 20 nt, synthetic construct
  misc_feature 1..20: note = spacer sequence
  source 1..20: mol_type = other RNA
tttaccaatttcatttagga

SEQ ID NO: 1450 - RNA, 20 nt, synthetic construct
  misc_feature 1..20: note = spacer sequence
  source 1..20: mol_type = other RNA
ataagctctgtcctcaaagt

SEQ ID NO: 1451 - RNA, 20 nt, synthetic construct
  misc_feature 1..20: note = spacer sequence
  source 1..20: mol_type = other RNA
gtcctcaaagttgaccattc

SEQ ID NO: 1452 - RNA, 20 nt, synthetic construct
  misc_feature 1..20: note = spacer sequence
  source 1..20: mol_type = other RNA
tcaaagttgaccattcgaca

SEQ ID NO: 1453 - RNA, 20 nt, synthetic construct
  misc_feature 1..20: note = spacer sequence
  source 1..20: mol_type = other RNA
aagttgaccattcgacattt

SEQ ID NO: 1454 - RNA, 20 nt, synthetic construct
  misc_feature 1..20: note = spacer sequence
  source 1..20: mol_type = other RNA
actttgaggacagagcttat

SEQ ID NO: 1455 - RNA, 20 nt, synthetic construct
  misc_feature 1..20: note = spacer sequence
  source 1..20: mol_type = other RNA
acatttttattaaagtcaca

SEQ ID NO: 1456 - RNA, 20 nt, synthetic construct
  misc_feature 1..20: note = spacer sequence
  source 1..20: mol_type = other RNA
aatggtcaactttgaggaca

SEQ ID NO: 1457 - RNA, 20 nt, synthetic construct
  misc_feature 1..20: note = spacer sequence
  source 1..20: mol_type = other RNA
cagaagaggacatagaagac

SEQ ID NO: 1458 - RNA, 20 nt, synthetic construct
  misc_feature 1..20: note = spacer sequence
  source 1..20: mol_type = other RNA
gtgactttaataaaaatgtc

SEQ ID NO: 1459 - RNA, 20 nt, synthetic construct
  misc_feature 1..20: note = spacer sequence
  source 1..20: mol_type = other RNA
tctgtgactttaataaaaat

SEQ ID NO: 1460 - RNA, 20 nt, synthetic construct
  misc_feature 1..20: note = spacer sequence
  source 1..20: mol_type = other RNA
tcttctgtgactttaataaa

SEQ ID NO: 1461 - RNA, 20 nt, synthetic construct
  misc_feature 1..20: note = spacer sequence
  source 1..20: mol_type = other RNA
atgtcctcttctgtgacttt

SEQ ID NO: 1462 - RNA, 20 nt, synthetic construct
  misc_feature 1..20: note = spacer sequence
  source 1..20: mol_type = other RNA
tctatgtcctcttctgtgac

SEQ ID NO: 1463 - RNA, 20 nt, synthetic construct
  misc_feature 1..20: note = spacer sequence
  source 1..20: mol_type = other RNA
gatttgtaagtagcacaaaa

SEQ ID NO: 1464 - RNA, 20 nt, synthetic construct
  misc_feature 1..20: note = spacer sequence
  source 1..20: mol_type = other RNA
gatagtgtcttctatgtcct

SEQ ID NO: 1465 - RNA, 20 nt, synthetic construct
  misc_feature 1..20: note = spacer sequence
  source 1..20: mol_type = other RNA
aatctaaaagaagacatcta

SEQ ID NO: 1466 - RNA, 20 nt, synthetic construct
  misc_feature 1..20: note = spacer sequence
  source 1..20: mol_type = other RNA
aaaagaagacatctaacaag

SEQ ID NO: 1467 - RNA, 20 nt, synthetic construct
  misc_feature 1..20: note = spacer sequence
  source 1..20: mol_type = other RNA
tttagatttgagtttcctga

SEQ ID NO: 1468 - RNA, 20 nt, synthetic construct
  misc_feature 1..20: note = spacer sequence
  source 1..20: mol_type = other RNA
tcttttagatttgagtttcc

SEQ ID NO: 1469 - RNA, 20 nt, synthetic construct
  misc_feature 1..20: note = spacer sequence
  source 1..20: mol_type = other RNA
aacaagagataaatgagaac

SEQ ID NO: 1470 - RNA, 20 nt, synthetic construct
  misc_feature 1..20: note = spacer sequence
  source 1..20: mol_type = other RNA
tgttagatgtcttcttttag

SEQ ID NO: 1471 - RNA, 20 nt, synthetic construct
  misc_feature 1..20: note = spacer sequence
  source 1..20: mol_type = other RNA
cttgttagatgtcttctttt

SEQ ID NO: 1472 - RNA, 20 nt, synthetic construct
  misc_feature 1..20: note = spacer sequence
  source 1..20: mol_type = other RNA
tttatctcttgttagatgtc

SEQ ID NO: 1473 - RNA, 20 nt, synthetic construct
  misc_feature 1..20: note = spacer sequence
  source 1..20: mol_type = other RNA
catttatctcttgttagatg

SEQ ID NO: 1474 - RNA, 20 nt, synthetic construct
  misc_feature 1..20: note = spacer sequence
  source 1..20: mol_type = other RNA
aaatacaggggttctcattt

SEQ ID NO: 1475 - RNA, 20 nt, synthetic construct
  misc_feature 1..20: note = spacer sequence
  source 1..20: mol_type = other RNA
aacacaagggcagaacagtt

SEQ ID NO: 1476 - RNA, 20 nt, synthetic construct
  misc_feature 1..20: note = spacer sequence
  source 1..20: mol_type = other RNA
cattttattatagtcaccca

SEQ ID NO: 1477 - RNA, 20 nt, synthetic construct
  misc_feature 1..20: note = spacer sequence
  source 1..20: mol_type = other RNA
cccagaatatacattatcaa

SEQ ID NO: 1478 - RNA, 20 nt, synthetic construct
  misc_feature 1..20: note = spacer sequence
  source 1..20: mol_type = other RNA
gggtgactataataaaatgt

SEQ ID NO: 1479 - RNA, 20 nt, synthetic construct
  misc_feature 1..20: note = spacer sequence
  source 1..20: mol_type = other RNA
aataaaggtttgtatataat

SEQ ID NO: 1480 - RNA, 20 nt, synthetic construct
  misc_feature 1..20: note = spacer sequence
  source 1..20: mol_type = other RNA
taatgagaaaaactcatgta

SEQ ID NO: 1481 - RNA, 20 nt, synthetic construct
  misc_feature 1..20: note = spacer sequence
  source 1..20: mol_type = other RNA
ttaggagtgtattatataca

SEQ ID NO: 1482 - RNA, 20 nt, synthetic construct
  misc_feature 1..20: note = spacer sequence
  source 1..20: mol_type = other RNA
cattaggagtgtattatata

SEQ ID NO: 1483 - RNA, 20 nt, synthetic construct
  misc_feature 1..20: note = spacer sequence
  source 1..20: mol_type = other RNA
tgtaatattaccctaacatt

SEQ ID NO: 1484 - RNA, 20 nt, synthetic construct
  misc_feature 1..20: note = spacer sequence
  source 1..20: mol_type = other RNA
attttaaacaataaatgtta

SEQ ID NO: 1485 - RNA, 20 nt, synthetic construct
  misc_feature 1..20: note = spacer sequence
  source 1..20: mol_type = other RNA
aacattcaaaaacctgttgg

SEQ ID NO: 1486 - RNA, 20 nt, synthetic construct
  misc_feature 1..20: note = spacer sequence
  source 1..20: mol_type = other RNA
aaaacctgttggaatttggg

SEQ ID NO: 1487 - RNA, 20 nt, synthetic construct
  misc_feature 1..20: note = spacer sequence
  source 1..20: mol_type = other RNA
ttgaaccgaaacaagaggaa

SEQ ID NO: 1488 - RNA, 20 nt, synthetic construct
  misc_feature 1..20: note = spacer sequence
  source 1..20: mol_type = other RNA
aagacgggtagcctcctgtc

SEQ ID NO: 1489 - RNA, 20 nt, synthetic construct
  misc_feature 1..20: note = spacer sequence
  source 1..20: mol_type = other RNA
gttcaaagacgggtagcctc

SEQ ID NO: 1490 - RNA, 20 nt, synthetic construct
  misc_feature 1..20: note = spacer sequence
  source 1..20: mol_type = other RNA
tgtttcggttcaaagacggg

SEQ ID NO: 1491 - RNA, 20 nt, synthetic construct
  misc_feature 1..20: note = spacer sequence
  source 1..20: mol_type = other RNA
tcttgtttcggttcaaagac

SEQ ID NO: 1492 - RNA, 20 nt, synthetic construct
  misc_feature 1..20: note = spacer sequence
  source 1..20: mol_type = other RNA
caccctggccttgttcctct

SEQ ID NO: 1493 - RNA, 20 nt, synthetic construct
  misc_feature 1..20: note = spacer sequence
  source 1..20: mol_type = other RNA
ttcccaccctggccttgttc

SEQ ID NO: 1494 - RNA, 20 nt, synthetic construct
  misc_feature 1..20: note = spacer sequence
  source 1..20: mol_type = other RNA
tttccatttacactagagtt

SEQ ID NO: 1495 - RNA, 20 nt, synthetic construct
  misc_feature 1..20: note = spacer sequence
  source 1..20: mol_type = other RNA
atttacactagagttaccta

SEQ ID NO: 1496 - RNA, 20 nt, synthetic construct
  misc_feature 1..20: note = spacer sequence
  source 1..20: mol_type = other RNA
agtgtaaatggaaacgaagt

SEQ ID NO: 1497 - RNA, 20 nt, synthetic construct
  misc_feature 1..20: note = spacer sequence
  source 1..20: mol_type = other RNA
ttttgtaggtaactctagtg

SEQ ID NO: 1498 - RNA, 20 nt, synthetic construct
  misc_feature 1..20: note = spacer sequence
  source 1..20: mol_type = other RNA
cccaatgtcaaaacaacagt

SEQ ID NO: 1499 - RNA, 20 nt, synthetic construct
  misc_feature 1..20: note = spacer sequence
  source 1..20: mol_type = other RNA
caatgtcaaaacaacagtga

SEQ ID NO: 1500 - RNA, 20 nt, synthetic construct
  misc_feature 1..20: note = spacer sequence
  source 1..20: mol_type = other RNA
aaacaacagtgaggtggtgg

SEQ ID NO: 1501 - RNA, 20 nt, synthetic construct
  misc_feature 1..20: note = spacer sequence
  source 1..20: mol_type = other RNA
ctgttgttttgacattggga

SEQ ID NO: 1502 - RNA, 20 nt, synthetic construct
  misc_feature 1..20: note = spacer sequence
  source 1..20: mol_type = other RNA
ctaagacacagttctgtggc

SEQ ID NO: 1503 - RNA, 20 nt, synthetic construct
  misc_feature 1..20: note = spacer sequence
  source 1..20: mol_type = other RNA
tagtgaccagcaggtggcgc

SEQ ID NO: 1504 - RNA, 20 nt, synthetic construct
  misc_feature 1..20: note = spacer sequence
  source 1..20: mol_type = other RNA
gtggcaactgaggcttgatc

SEQ ID NO: 1505 - RNA, 20 nt, synthetic construct
  misc_feature 1..20: note = spacer sequence
  source 1..20: mol_type = other RNA
gttgccacagaactgtgtct

SEQ ID NO: 1506 - RNA, 20 nt, synthetic construct
  misc_feature 1..20: note = spacer sequence
  source 1..20: mol_type = other RNA
agcctcagttgccacagaac

SEQ ID NO: 1507 - RNA, 20 nt, synthetic construct
  misc_feature 1..20: note = spacer sequence
  source 1..20: mol_type = other RNA
cttagtggttgtgaggagga

SEQ ID NO: 1508 - RNA, 20 nt, synthetic construct
  misc_feature 1..20: note = spacer sequence
  source 1..20: mol_type = other RNA
tagtggttgtgaggaggaga

SEQ ID NO: 1509 - RNA, 20 nt, synthetic construct
  misc_feature 1..20: note = spacer sequence
  source 1..20: mol_type = other RNA
caaccactaagagatcaagc

SEQ ID NO: 1510 - RNA, 20 nt, synthetic construct
  misc_feature 1..20: note = spacer sequence
  source 1..20: mol_type = other RNA
tcacaaccactaagagatca

SEQ ID NO: 1511 - RNA, 20 nt, synthetic construct
  misc_feature 1..20: note = spacer sequence
  source 1..20: mol_type = other RNA
tcctcacaaccactaagaga

SEQ ID NO: 1512 - RNA, 20 nt, synthetic construct
  misc_feature 1..20: note = spacer sequence
  source 1..20: mol_type = other RNA
cctcctcacaaccactaaga

SEQ ID NO: 1513 - RNA, 20 nt, synthetic construct
  misc_feature 1..20: note = spacer sequence
  source 1..20: mol_type = other RNA
ccaggggttacctgggaaga

SEQ ID NO: 1514 - RNA, 20 nt, synthetic construct
  misc_feature 1..20: note = spacer sequence
  source 1..20: mol_type = other RNA
atttgtgcctttgtttagtc

SEQ ID NO: 1515 - RNA, 20 nt, synthetic construct
  misc_feature 1..20: note = spacer sequence
  source 1..20: mol_type = other RNA
cctgcacaggtatttccatt

SEQ ID NO: 1516 - RNA, 20 nt, synthetic construct
  misc_feature 1..20: note = spacer sequence
  source 1..20: mol_type = other RNA
tcccctgcacaggtatttcc

SEQ ID NO: 1517 - RNA, 20 nt, synthetic construct
  misc_feature 1..20: note = spacer sequence
  source 1..20: mol_type = other RNA
cattttcatcccctgcacag

SEQ ID NO: 1518 - RNA, 20 nt, synthetic construct
  misc_feature 1..20: note = spacer sequence
  source 1..20: mol_type = other RNA
ttcacattttcatcccctgc

SEQ ID NO: 1519 - RNA, 20 nt, synthetic construct
  misc_feature 1..20: note = spacer sequence
  source 1..20: mol_type = other RNA
gggcttgttaccctattatt

SEQ ID NO: 1520 - RNA, 20 nt, synthetic construct
  misc_feature 1..20: note = spacer sequence
  source 1..20: mol_type = other RNA
tcagggcttgttaccctatt

SEQ ID NO: 1521 - RNA, 20 nt, synthetic construct
  misc_feature 1..20: note = spacer sequence
  source 1..20: mol_type = other RNA
ttttatttcccaagcattgt

SEQ ID NO: 1522 - RNA, 20 nt, synthetic construct
  misc_feature 1..20: note = spacer sequence
  source 1..20: mol_type = other RNA
caagcattgttttaccccaa

SEQ ID NO: 1523 - RNA, 20 nt, synthetic construct
  misc_feature 1..20: note = spacer sequence
  source 1..20: mol_type = other RNA
agagatggtctggaaagagg

SEQ ID NO: 1524 - RNA, 20 nt, synthetic construct
  misc_feature 1..20: note = spacer sequence
  source 1..20: mol_type = other RNA
taaatcaagagatggtctgg

SEQ ID NO: 1525 - RNA, 20 nt, synthetic construct
  misc_feature 1..20: note = spacer sequence
  source 1..20: mol_type = other RNA
cagagcatacatctttttaa

SEQ ID NO: 1526 - RNA, 20 nt, synthetic construct
  misc_feature 1..20: note = spacer sequence
  source 1..20: mol_type = other RNA
gagcatacatctttttaaaa

SEQ ID NO: 1527 - RNA, 20 nt, synthetic construct
  misc_feature 1..20: note = spacer sequence
  source 1..20: mol_type = other RNA
gagaaaccagcctgtcgtaa

SEQ ID NO: 1528 - RNA, 20 nt, synthetic construct
  misc_feature 1..20: note = spacer sequence
  source 1..20: mol_type = other RNA
ttttaaaattattattaaat

SEQ ID NO: 1529 - RNA, 20 nt, synthetic construct
  misc_feature 1..20: note = spacer sequence
  source 1..20: mol_type = other RNA
ataattatttaataataatt

SEQ ID NO: 1530 - RNA, 20 nt, synthetic construct
  misc_feature 1..20: note = spacer sequence
  source 1..20: mol_type = other RNA
ctggaaattgcaaagataga

SEQ ID NO: 1531 - RNA, 20 nt, synthetic construct
  misc_feature 1..20: note = spacer sequence
  source 1..20: mol_type = other RNA
agtgaatctataattattta

SEQ ID NO: 1532 - RNA, 20 nt, synthetic construct
  misc_feature 1..20: note = spacer sequence
  source 1..20: mol_type = other RNA
ttgcaatttccagtgaatct

SEQ ID NO: 1533 - RNA, 20 nt, synthetic construct
  misc_feature 1..20: note = spacer sequence
  source 1..20: mol_type = other RNA
atctttgcaatttccagtga

SEQ ID NO: 1534 - RNA, 20 nt, synthetic construct
  misc_feature 1..20: note = spacer sequence
  source 1..20: mol_type = other RNA
tgtctatctttgcaatttcc

SEQ ID NO: 1535 - RNA, 20 nt, synthetic construct
  misc_feature 1..20: note = spacer sequence
  source 1..20: mol_type = other RNA
gtcctgtctatctttgcaat

SEQ ID NO: 1536 - RNA, 20 nt, synthetic construct
  misc_feature 1..20: note = spacer sequence
  source 1..20: mol_type = other RNA
tatttttagtacagacgggg

SEQ ID NO: 1537 - RNA, 20 nt, synthetic construct
  misc_feature 1..20: note = spacer sequence
  source 1..20: mol_type = other RNA
agctactcaggaggctgagg

SEQ ID NO: 1538 - RNA, 20 nt, synthetic construct
  misc_feature 1..20: note = spacer sequence
  source 1..20: mol_type = other RNA
ggaggctgaggcaggagaat

SEQ ID NO: 1539 - RNA, 20 nt, synthetic construct
  misc_feature 1..20: note = spacer sequence
  source 1..20: mol_type = other RNA
tgagtagctggattacaggc

SEQ ID NO: 1540 - RNA, 20 nt, synthetic construct
  misc_feature 1..20: note = spacer sequence
  source 1..20: mol_type = other RNA
gcctcctgagtagctggatt

SEQ ID NO: 1541 - RNA, 20 nt, synthetic construct
  misc_feature 1..20: note = spacer sequence
  source 1..20: mol_type = other RNA
tgcctcagcctcctgagtag

SEQ ID NO: 1542 - RNA, 20 nt, synthetic construct
  misc_feature 1..20: note = spacer sequence
  source 1..20: mol_type = other RNA
cctgcctcagcctcctgagt

SEQ ID NO: 1543 - RNA, 20 nt, synthetic construct
  misc_feature 1..20: note = spacer sequence
  source 1..20: mol_type = other RNA
agctattctcctgcctcagc

SEQ ID NO: 1544 - RNA, 20 nt, synthetic construct
  misc_feature 1..20: note = spacer sequence
  source 1..20: mol_type = other RNA
tgggttcaagctattctcct

SEQ ID NO: 1545 - RNA, 20 nt, synthetic construct
  misc_feature 1..20: note = spacer sequence
  source 1..20: mol_type = other RNA
acttcctgggttcaagctat

SEQ ID NO: 1546 - RNA, 20 nt, synthetic construct
  misc_feature 1..20: note = spacer sequence
  source 1..20: mol_type = other RNA
ctgcaacctccacttcctgg

SEQ ID NO: 1547 - RNA, 20 nt, synthetic construct
  misc_feature 1..20: note = spacer sequence
  source 1..20: mol_type = other RNA
ggtcactgcaacctccactt

SEQ ID NO: 1548 - RNA, 20 nt, synthetic construct
  misc_feature 1..20: note = spacer sequence
  source 1..20: mol_type = other RNA
caggtcactgcaacctccac

SEQ ID NO: 1549 - RNA, 20 nt, synthetic construct
  misc_feature 1..20: note = spacer sequence
  source 1..20: mol_type = other RNA
cgccactgcactccagccta

SEQ ID NO: 1550 - RNA, 20 nt, synthetic construct
  misc_feature 1..20: note = spacer sequence
  source 1..20: mol_type = other RNA
agcctaggtgacagagcaag

SEQ ID NO: 1551 - RNA, 20 nt, synthetic construct
  misc_feature 1..20: note = spacer sequence
  source 1..20: mol_type = other RNA
cctaggctggagtgcagtgg

SEQ ID NO: 1552 - RNA, 20 nt, synthetic construct
  misc_feature 1..20: note = spacer sequence
  source 1..20: mol_type = other RNA
ctttctagcaatcccaggtc

SEQ ID NO: 1553 - RNA, 20 nt, synthetic construct
  misc_feature 1..20: note = spacer sequence
  source 1..20: mol_type = other RNA
agcaatcccaggtctttaga

SEQ ID NO: 1554 - RNA, 20 nt, synthetic construct
  misc_feature 1..20: note = spacer sequence
  source 1..20: mol_type = other RNA
caggtctttagacaaactca

SEQ ID NO: 1555 - RNA, 20 nt, synthetic construct
  misc_feature 1..20: note = spacer sequence
  source 1..20: mol_type = other RNA
ttagacaaactcaaccaatt

SEQ ID NO: 1556 - RNA, 20 nt, synthetic construct
  misc_feature 1..20: note = spacer sequence
  source 1..20: mol_type = other RNA
aaagacctgggattgctaga

SEQ ID NO: 1557 - RNA, 20 nt, synthetic construct
  misc_feature 1..20: note = spacer sequence
  source 1..20: mol_type = other RNA
accaattgtcaaccagaaaa

SEQ ID NO: 1558 - RNA, 20 nt, synthetic construct
  misc_feature 1..20: note = spacer sequence
  source 1..20: mol_type = other RNA
accagaaaatgcttaaattc

SEQ ID NO: 1559 - RNA, 20 nt, synthetic construct
  misc_feature 1..20: note = spacer sequence
  source 1..20: mol_type = other RNA
ggttgacaattggttgagtt

SEQ ID NO: 1560 - RNA, 20 nt, synthetic construct
  misc_feature 1..20: note = spacer sequence
  source 1..20: mol_type = other RNA
cctggaggcgcccccccact

SEQ ID NO: 1561 - RNA, 20 nt, synthetic construct
  misc_feature 1..20: note = spacer sequence
  source 1..20: mol_type = other RNA
aggtgaatttaagcattttc

SEQ ID NO: 1562 - RNA, 20 nt, synthetic construct
  misc_feature 1..20: note = spacer sequence
  source 1..20: mol_type = other RNA
tcccctgctttgagttgtcc

SEQ ID NO: 1563 - RNA, 20 nt, synthetic construct
  misc_feature 1..20: note = spacer sequence
  source 1..20: mol_type = other RNA
cctgctttgagttgtccctc

SEQ ID NO: 1564 - RNA, 20 nt, synthetic construct
  misc_feature 1..20: note = spacer sequence
  source 1..20: mol_type = other RNA
aagcaggggatgaagtgggg

SEQ ID NO: 1565 - RNA, 20 nt, synthetic construct
  misc_feature 1..20: note = spacer sequence
  source 1..20: mol_type = other RNA
ctcttttctgggccagacca

SEQ ID NO: 1566 - RNA, 20 nt, synthetic construct
  misc_feature 1..20: note = spacer sequence
  source 1..20: mol_type = other RNA
tttctgggccagaccaatga

SEQ ID NO: 1567 - RNA, 20 nt, synthetic construct
  misc_feature 1..20: note = spacer sequence
  source 1..20: mol_type = other RNA
gggccagaccaatgaattca

SEQ ID NO: 1568 - RNA, 20 nt, synthetic construct
  misc_feature 1..20: note = spacer sequence
  source 1..20: mol_type = other RNA
ggcccagaaaagagggacaa

SEQ ID NO: 1569 - RNA, 20 nt, synthetic construct
  misc_feature 1..20: note = spacer sequence
  source 1..20: mol_type = other RNA
ttggtctggcccagaaaaga

SEQ ID NO: 1570 - RNA, 20 nt, synthetic construct
  misc_feature 1..20: note = spacer sequence
  source 1..20: mol_type = other RNA
atgaatttcttaaatgtatt

SEQ ID NO: 1571 - RNA, 20 nt, synthetic construct
  misc_feature 1..20: note = spacer sequence
  source 1..20: mol_type = other RNA
ttgaattcattggtctggcc

SEQ ID NO: 1572 - RNA, 20 nt, synthetic construct
  misc_feature 1..20: note = spacer sequence
  source 1..20: mol_type = other RNA
taaatgtatttgattgatgt

SEQ ID NO: 1573 - RNA, 20 nt, synthetic construct
  misc_feature 1..20: note = spacer sequence
  source 1..20: mol_type = other RNA
aatacatttaagaaattcat

SEQ ID NO: 1574 - RNA, 20 nt, synthetic construct
  misc_feature 1..20: note = spacer sequence
  source 1..20: mol_type = other RNA
atcaaatacatttaagaaat

SEQ ID NO: 1575 - RNA, 20 nt, synthetic construct
  misc_feature 1..20: note = spacer sequence
  source 1..20: mol_type = other RNA
catgtctctctaaaatgtat

SEQ ID NO: 1576 - RNA, 20 nt, synthetic construct
  misc_feature 1..20: note = spacer sequence
  source 1..20: mol_type = other RNA
tgtctctctaaaatgtataa

SEQ ID NO: 1577 - RNA, 20 nt, synthetic construct
  misc_feature 1..20: note = spacer sequence
  source 1..20: mol_type = other RNA
ctctaaaatgtataaaacca

SEQ ID NO: 1578 - RNA, 20 nt, synthetic construct
  misc_feature 1..20: note = spacer sequence
  source 1..20: mol_type = other RNA
ctaaaatgtataaaaccaag

SEQ ID NO: 1579 - RNA, 20 nt, synthetic construct
  misc_feature 1..20: note = spacer sequence
  source 1..20: mol_type = other RNA
aaaatgtataaaaccaagct

SEQ ID NO: 1580 - RNA, 20 nt, synthetic construct
  misc_feature 1..20: note = spacer sequence
  source 1..20: mol_type = other RNA
tggtcacatgttctgaggac

SEQ ID NO: 1581 - RNA, 20 nt, synthetic construct
  misc_feature 1..20: note = spacer sequence
  source 1..20: mol_type = other RNA
ctctgagcctttctgtcttg

SEQ ID NO: 1582 - RNA, 20 nt, synthetic construct
  misc_feature 1..20: note = spacer sequence
  source 1..20: mol_type = other RNA
tctctctgagcctttctgtc

SEQ ID NO: 1583 - RNA, 20 nt, synthetic construct
  misc_feature 1..20: note = spacer sequence
  source 1..20: mol_type = other RNA
agggcctggagaaggtgctg

SEQ ID NO: 1584 - RNA, 20 nt, synthetic construct
  misc_feature 1..20: note = spacer sequence
  source 1..20: mol_type = other RNA
aggcccttgagctggcctgg

SEQ ID NO: 1585 - RNA, 20 nt, synthetic construct
  misc_feature 1..20: note = spacer sequence
  source 1..20: mol_type = other RNA
ccaggcccttgagctggcct

SEQ ID NO: 1586 - RNA, 20 nt, synthetic construct
  misc_feature 1..20: note = spacer sequence
  source 1..20: mol_type = other RNA
agcaccttctccaggccctt

SEQ ID NO: 1587 - RNA, 20 nt, synthetic construct
  misc_feature 1..20: note = spacer sequence
  source 1..20: mol_type = other RNA
tggtcccgagaccagctcgg

SEQ ID NO: 1588 - RNA, 20 nt, synthetic construct
  misc_feature 1..20: note = spacer sequence
  source 1..20: mol_type = other RNA
cgagaccagctcggtcaggg

SEQ ID NO: 1589 - RNA, 20 nt, synthetic construct
  misc_feature 1..20: note = spacer sequence
  source 1..20: mol_type = other RNA
ggaccaagagtaattttttc

SEQ ID NO: 1590 - RNA, 20 nt, synthetic construct
  misc_feature 1..20: note = spacer sequence
  source 1..20: mol_type = other RNA
cgggaccaagagtaattttt

SEQ ID NO: 1591 - RNA, 20 nt, synthetic construct
  misc_feature 1..20: note = spacer sequence
  source 1..20: mol_type = other RNA
gtcagggagaccctaaccca

SEQ ID NO: 1592 - RNA, 20 nt, synthetic construct
  misc_feature 1..20: note = spacer sequence
  source 1..20: mol_type = other RNA
gggagaccctaacccagcgg

SEQ ID NO: 1593 - RNA, 20 nt, synthetic construct
  misc_feature 1..20: note = spacer sequence
  source 1..20: mol_type = other RNA
tggggccagtttatggctgg

SEQ ID NO: 1594 - RNA, 20 nt, synthetic construct
  misc_feature 1..20: note = spacer sequence
  source 1..20: mol_type = other RNA
agccataaactggccccaag

SEQ ID NO: 1595 - RNA, 20 nt, synthetic construct
  misc_feature 1..20: note = spacer sequence
  source 1..20: mol_type = other RNA
caacaacttggaatggcact

SEQ ID NO: 1596 - RNA, 20 nt, synthetic construct
  misc_feature 1..20: note = spacer sequence
  source 1..20: mol_type = other RNA
aagttgttgggagcaagccc

SEQ ID NO: 1597 - RNA, 20 nt, synthetic construct
  misc_feature 1..20: note = spacer sequence
  source 1..20: mol_type = other RNA
agtgccattccaagttgttg

SEQ ID NO: 1598 - RNA, 20 nt, synthetic construct
  misc_feature 1..20: note = spacer sequence
  source 1..20: mol_type = other RNA
aggagctttggatgattggc

SEQ ID NO: 1599 - RNA, 20 nt, synthetic construct
  misc_feature 1..20: note = spacer sequence
  source 1..20: mol_type = other RNA
tggaacccttcaagtgccat

SEQ ID NO: 1600 - RNA, 20 nt, synthetic construct
  misc_feature 1..20: note = spacer sequence
  source 1..20: mol_type = other RNA
ctgcagtctctgtatacaca

SEQ ID NO: 1601 - RNA, 20 nt, synthetic construct
  misc_feature 1..20: note = spacer sequence
  source 1..20: mol_type = other RNA
tttgtactcactgcagtctc

SEQ ID NO: 1602 - RNA, 20 nt, synthetic construct
  misc_feature 1..20: note = spacer sequence
  source 1..20: mol_type = other RNA
acagacaggcagaggggaac

SEQ ID NO: 1603 - RNA, 20 nt, synthetic construct
  misc_feature 1..20: note = spacer sequence
  source 1..20: mol_type = other RNA
gttgaccctcctttgtactc

SEQ ID NO: 1604 - RNA, 20 nt, synthetic construct
  misc_feature 1..20: note = spacer sequence
  source 1..20: mol_type = other RNA
gcctgtctgttgaccctcct

SEQ ID NO: 1605 - RNA, 20 nt, synthetic construct
  misc_feature 1..20: note = spacer sequence
  source 1..20: mol_type = other RNA
cctctgcctgtctgttgacc

SEQ ID NO: 1606 - RNA, 20 nt, synthetic construct
  misc_feature 1..20: note = spacer sequence
  source 1..20: mol_type = other RNA
aatgttcccctctgcctgtc

SEQ ID NO: 1607 - RNA, 20 nt, synthetic construct
  misc_feature 1..20: note = spacer sequence
  source 1..20: mol_type = other RNA
ccttgaactccctgacaaga

SEQ ID NO: 1608 - RNA, 20 nt, synthetic construct
  misc_feature 1..20: note = spacer sequence
  source 1..20: mol_type = other RNA
aggtgacagtgtcaaatgtt

SEQ ID NO: 1609 - RNA, 20 nt, synthetic construct
  misc_feature 1..20: note = spacer sequence
  source 1..20: mol_type = other RNA
ctgacaagatcctttgagat

SEQ ID NO: 1610 - RNA, 20 nt, synthetic construct
  misc_feature 1..20: note = spacer sequence
  source 1..20: mol_type = other RNA
gccatcaccacaacccatct

SEQ ID NO: 1611 - RNA, 20 nt, synthetic construct
  misc_feature 1..20: note = spacer sequence
  source 1..20: mol_type = other RNA
ccacaacccatctccagaac

SEQ ID NO: 1612 - RNA, 20 nt, synthetic construct
  misc_feature 1..20: note = spacer sequence
  source 1..20: mol_type = other RNA
ccagaactttccatcatcct

SEQ ID NO: 1613 - RNA, 20 nt, synthetic construct
  misc_feature 1..20: note = spacer sequence
  source 1..20: mol_type = other RNA
agaactttccatcatcctaa

SEQ ID NO: 1614 - RNA, 20 nt, synthetic construct
  misc_feature 1..20: note = spacer sequence
  source 1..20: mol_type = other RNA
ggagatgggttgtggtgatg

SEQ ID NO: 1615 - RNA, 20 nt, synthetic construct
  misc_feature 1..20: note = spacer sequence
  source 1..20: mol_type = other RNA
atcatcctaagctaaaactc

SEQ ID NO: 1616 - RNA, 20 nt, synthetic construct
  misc_feature 1..20: note = spacer sequence
  source 1..20: mol_type = other RNA
tcctaagctaaaactctgta

SEQ ID NO: 1617 - RNA, 20 nt, synthetic construct
  misc_feature 1..20: note = spacer sequence
  source 1..20: mol_type = other RNA
taagctaaaactctgtaccc

SEQ ID NO: 1618 - RNA, 20 nt, synthetic construct
  misc_feature 1..20: note = spacer sequence
  source 1..20: mol_type = other RNA
gtacccatttaacaataacc

SEQ ID NO: 1619 - RNA, 20 nt, synthetic construct
  misc_feature 1..20: note = spacer sequence
  source 1..20: mol_type = other RNA
tgctcctccagctcccagaa

SEQ ID NO: 1620 - RNA, 20 nt, synthetic construct
  misc_feature 1..20: note = spacer sequence
  source 1..20: mol_type = other RNA
tccagctcccagaaaccttt

SEQ ID NO: 1621 - RNA, 20 nt, synthetic construct
  misc_feature 1..20: note = spacer sequence
  source 1..20: mol_type = other RNA
agctcccagaaacctttatt

SEQ ID NO: 1622 - RNA, 20 nt, synthetic construct
  misc_feature 1..20: note = spacer sequence
  source 1..20: mol_type = other RNA
cagaaacctttattctactt

SEQ ID NO: 1623 - RNA, 20 nt, synthetic construct
  misc_feature 1..20: note = spacer sequence
  source 1..20: mol_type = other RNA
gggagctggaggagcacgaa

SEQ ID NO: 1624 - RNA, 20 nt, synthetic construct
  misc_feature 1..20: note = spacer sequence
  source 1..20: mol_type = other RNA
actttctgtgtctataaatt

SEQ ID NO: 1625 - RNA, 20 nt, synthetic construct
  misc_feature 1..20: note = spacer sequence
  source 1..20: mol_type = other RNA
gtgtctataaatttgcctcc

SEQ ID NO: 1626 - RNA, 20 nt, synthetic construct
  misc_feature 1..20: note = spacer sequence
  source 1..20: mol_type = other RNA
ataaatttgcctcctctaag

SEQ ID NO: 1627 - RNA, 20 nt, synthetic construct
  misc_feature 1..20: note = spacer sequence
  source 1..20: mol_type = other RNA
tctaagtgccttatgtaagt

SEQ ID NO: 1628 - RNA, 20 nt, synthetic construct
  misc_feature 1..20: note = spacer sequence
  source 1..20: mol_type = other RNA
aagtgccttatgtaagtgga

SEQ ID NO: 1629 - RNA, 20 nt, synthetic construct
  misc_feature 1..20: note = spacer sequence
  source 1..20: mol_type = other RNA
gccaaaaaaaattataatct

SEQ ID NO: 1630 - RNA, 20 nt, synthetic construct
  misc_feature 1..20: note = spacer sequence
  source 1..20: mol_type = other RNA
cacatataatcccagcactc

SEQ ID NO: 1631 - RNA, 20 nt, synthetic construct
  misc_feature 1..20: note = spacer sequence
  source 1..20: mol_type = other RNA
cagcactctgggaggccaag

SEQ ID NO: 1632 - RNA, 20 nt, synthetic construct
  misc_feature 1..20: note = spacer sequence
  source 1..20: mol_type = other RNA
gggaggccaaggcaggagga

SEQ ID NO: 1633 - RNA, 20 nt, synthetic construct
  misc_feature 1..20: note = spacer sequence
  source 1..20: mol_type = other RNA
cagagtgctgggattatatg

SEQ ID NO: 1634 - RNA, 20 nt, synthetic construct
  misc_feature 1..20: note = spacer sequence
  source 1..20: mol_type = other RNA
tgccttggcctcccagagtg

SEQ ID NO: 1635 - RNA, 20 nt, synthetic construct
  misc_feature 1..20: note = spacer sequence
  source 1..20: mol_type = other RNA
tcctgccttggcctcccaga

SEQ ID NO: 1636 - RNA, 20 nt, synthetic construct
  misc_feature 1..20: note = spacer sequence
  source 1..20: mol_type = other RNA
cttgaggccaggagttcgag

SEQ ID NO: 1637 - RNA, 20 nt, synthetic construct
  misc_feature 1..20: note = spacer sequence
  source 1..20: mol_type = other RNA
agtgatcctcctgccttggc

SEQ ID NO: 1638 - RNA, 20 nt, synthetic construct
  misc_feature 1..20: note = spacer sequence
  source 1..20: mol_type = other RNA
tggcctcaagtgatcctcct

SEQ ID NO: 1639 - RNA, 20 nt, synthetic construct
  misc_feature 1..20: note = spacer sequence
  source 1..20: mol_type = other RNA
agaccagcctggccaacatg

SEQ ID NO: 1640 - RNA, 20 nt, synthetic construct
  misc_feature 1..20: note = spacer sequence
  source 1..20: mol_type = other RNA
aactcctggcctcaagtgat

SEQ ID NO: 1641 - RNA, 20 nt, synthetic construct
  misc_feature 1..20: note = spacer sequence
  source 1..20: mol_type = other RNA
cgaactcctggcctcaagtg

SEQ ID NO: 1642 - RNA, 20 nt, synthetic construct
  misc_feature 1..20: note = spacer sequence
  source 1..20: mol_type = other RNA
ccatgttggccaggctggtc

SEQ ID NO: 1643 - RNA, 20 nt, synthetic construct
  misc_feature 1..20: note = spacer sequence
  source 1..20: mol_type = other RNA
ctactaaaaatacaaaaatg

SEQ ID NO: 1644 - RNA, 20 nt, synthetic construct
  misc_feature 1..20: note = spacer sequence
  source 1..20: mol_type = other RNA
actaaaaatacaaaaatggg

SEQ ID NO: 1645 - RNA, 20 nt, synthetic construct
  misc_feature 1..20: note = spacer sequence
  source 1..20: mol_type = other RNA
cactctgtcgcccagggtgg

SEQ ID NO: 1646 - RNA, 20 nt, synthetic construct
  misc_feature 1..20: note = spacer sequence
  source 1..20: mol_type = other RNA
agctcaaaaaaaaaaaaaaa

SEQ ID NO: 1647 - RNA, 20 nt, synthetic construct
  misc_feature 1..20: note = spacer sequence
  source 1..20: mol_type = other RNA
aaaaaaaaaaaaaaaaaaaa

SEQ ID NO: 1648 - RNA, 20 nt, synthetic construct
  misc_feature 1..20: note = spacer sequence
  source 1..20: mol_type = other RNA
tttttttttttttttttttt

SEQ ID NO: 1649 - RNA, 20 nt, synthetic construct
  misc_feature 1..20: note = spacer sequence
  source 1..20: mol_type = other RNA
gcagacatcgtgccctttgc

SEQ ID NO: 1650 - RNA, 20 nt, synthetic construct
  misc_feature 1..20: note = spacer sequence
  source 1..20: mol_type = other RNA
gctgagcacttctttttttt

SEQ ID NO: 1651 - RNA, 20 nt, synthetic construct
  misc_feature 1..20: note = spacer sequence
  source 1..20: mol_type = other RNA
tgccctttgccctttggcta

SEQ ID NO: 1652 - RNA, 20 nt, synthetic construct
  misc_feature 1..20: note = spacer sequence
  source 1..20: mol_type = other RNA
tgttttaaaaataccttttt

SEQ ID NO: 1653 - RNA, 20 nt, synthetic construct
  misc_feature 1..20: note = spacer sequence
  source 1..20: mol_type = other RNA
gtttagtatacaaaactgaa

SEQ ID NO: 1654 - RNA, 20 nt, synthetic construct
  misc_feature 1..20: note = spacer sequence
  source 1..20: mol_type = other RNA
aatgcaattacttctgttta

SEQ ID NO: 1655 - RNA, 20 nt, synthetic construct
  misc_feature 1..20: note = spacer sequence
  source 1..20: mol_type = other RNA
tcaaatgcaattacttctgt

SEQ ID NO: 1656 - RNA, 20 nt, synthetic construct
  misc_feature 1..20: note = spacer sequence
  source 1..20: mol_type = other RNA
tttgtcatcaaatgcaatta

SEQ ID NO: 1657 - RNA, 20 nt, synthetic construct
  misc_feature 1..20: note = spacer sequence
  source 1..20: mol_type = other RNA
ttttcctttgtcatcaaatg

SEQ ID NO: 1658 - RNA, 20 nt, synthetic construct
  misc_feature 1..20: note = spacer sequence
  source 1..20: mol_type = other RNA
ttctttttcctttgtcatca

SEQ ID NO: 1659 - RNA, 20 nt, synthetic construct
  misc_feature 1..20: note = spacer sequence
  source 1..20: mol_type = other RNA
gcaaagggatcatttggggt

SEQ ID NO: 1660 - RNA, 20 nt, synthetic construct
  misc_feature 1..20: note = spacer sequence
  source 1..20: mol_type = other RNA
ctttgctgatttcattcttt

SEQ ID NO: 1661 - RNA, 20 nt, synthetic construct
  misc_feature 1..20: note = spacer sequence
  source 1..20: mol_type = other RNA
tttggggttttttggctcag

SEQ ID NO: 1662 - RNA, 20 nt, synthetic construct
  misc_feature 1..20: note = spacer sequence
  source 1..20: mol_type = other RNA
gtgattcctgtggcagccgt

SEQ ID NO: 1663 - RNA, 20 nt, synthetic construct
  misc_feature 1..20: note = spacer sequence
  source 1..20: mol_type = other RNA
ctgagccaaaaaaccccaaa

SEQ ID NO: 1664 - RNA, 20 nt, synthetic construct
  misc_feature 1..20: note = spacer sequence
  source 1..20: mol_type = other RNA
tgtggcagccgttgtggtgg

SEQ ID NO: 1665 - RNA, 20 nt, synthetic construct
  misc_feature 1..20: note = spacer sequence
  source 1..20: mol_type = other RNA
gtgtctatttgcctaggcca

SEQ ID NO: 1666 - RNA, 20 nt, synthetic construct
  misc_feature 1..20: note = spacer sequence
  source 1..20: mol_type = other RNA
atttgcctaggccatggtac

SEQ ID NO: 1667 - RNA, 20 nt, synthetic construct
  misc_feature 1..20: note = spacer sequence
  source 1..20: mol_type = other RNA
ggtaccggtccagatgttgt

SEQ ID NO: 1668 - RNA, 20 nt, synthetic construct
  misc_feature 1..20: note = spacer sequence
  source 1..20: mol_type = other RNA
agatgttgtaaaggtatagg

SEQ ID NO: 1669 - RNA, 20 nt, synthetic construct
  misc_feature 1..20: note = spacer sequence
  source 1..20: mol_type = other RNA
ggaccggtacctgaccaaac

SEQ ID NO: 1670 - RNA, 20 nt, synthetic construct
  misc_feature 1..20: note = spacer sequence
  source 1..20: mol_type = other RNA
tgagatagagtctcactctg

SEQ ID NO: 1671 - RNA, 20 nt, synthetic construct
  misc_feature 1..20: note = spacer sequence
  source 1..20: mol_type = other RNA
agaaaaaaaatatacctata

SEQ ID NO: 1672 - RNA, 20 nt, synthetic construct
  misc_feature 1..20: note = spacer sequence
  source 1..20: mol_type = other RNA
caagaaaaaaaatataccta

SEQ ID NO: 1673 - RNA, 20 nt, synthetic construct
  misc_feature 1..20: note = spacer sequence
  source 1..20: mol_type = other RNA
atctcaagaaaaaaaatata

SEQ ID NO: 1674 - RNA, 20 nt, synthetic construct
  misc_feature 1..20: note = spacer sequence
  source 1..20: mol_type = other RNA
cactctgtcgcccaggctgg

SEQ ID NO: 1675 - RNA, 20 nt, synthetic construct
  misc_feature 1..20: note = spacer sequence
  source 1..20: mol_type = other RNA
ctctgtcgcccaggctggag

SEQ ID NO: 1676 - RNA, 20 nt, synthetic construct
  misc_feature 1..20: note = spacer sequence
  source 1..20: mol_type = other RNA
acttaaaatacaaaaaaaat

SEQ ID NO: 1677 - RNA, 20 nt, synthetic construct
  misc_feature 1..20: note = spacer sequence
  source 1..20: mol_type = other RNA
ctacttaaaatacaaaaaaa

SEQ ID NO: 1678 - RNA, 20 nt, synthetic construct
  misc_feature 1..20: note = spacer sequence
  source 1..20: mol_type = other RNA
gtctctacttaaaatacaaa

SEQ ID NO: 1679 - RNA, 20 nt, synthetic construct
  misc_feature 1..20: note = spacer sequence
  source 1..20: mol_type = other RNA
ccatgttggccagactggtc

SEQ ID NO: 1680 - RNA, 20 nt, synthetic construct
  misc_feature 1..20: note = spacer sequence
  source 1..20: mol_type = other RNA
ggccaacatggtgaaactcc

SEQ ID NO: 1681 - RNA, 20 nt, synthetic construct
  misc_feature 1..20: note = spacer sequence
  source 1..20: mol_type = other RNA
cgaactcctggactcaagtg

SEQ ID NO: 1682 - RNA, 20 nt, synthetic construct
  misc_feature 1..20: note = spacer sequence
  source 1..20: mol_type = other RNA
aactcctggactcaagtgat

SEQ ID NO: 1683 - RNA, 20 nt, synthetic construct
  misc_feature 1..20: note = spacer sequence
  source 1..20: mol_type = other RNA
agaccagtctggccaacatg

SEQ ID NO: 1684 - RNA, 20 nt, synthetic construct
  misc_feature 1..20: note = spacer sequence
  source 1..20: mol_type = other RNA
tggactcaagtgatctgtcc

SEQ ID NO: 1685 - RNA, 20 nt, synthetic construct
  misc_feature 1..20: note = spacer sequence
  source 1..20: mol_type = other RNA
aggagttcgagaccagtctg

SEQ ID NO: 1686 - RNA, 20 nt, synthetic construct
  misc_feature 1..20: note = spacer sequence
  source 1..20: mol_type = other RNA
agtgatctgtccaccttggc

SEQ ID NO: 1687 - RNA, 20 nt, synthetic construct
  misc_feature 1..20: note = spacer sequence
  source 1..20: mol_type = other RNA
cttgagtccaggagttcgag

SEQ ID NO: 1688 - RNA, 20 nt, synthetic construct
  misc_feature 1..20: note = spacer sequence
  source 1..20: mol_type = other RNA
gtccaccttggcctcccgaa

SEQ ID NO: 1689 - RNA, 20 nt, synthetic construct
  misc_feature 1..20: note = spacer sequence
  source 1..20: mol_type = other RNA
ataatgtgggtatgcggtat

SEQ ID NO: 1690 - RNA, 20 nt, synthetic construct
  misc_feature 1..20: note = spacer sequence
  source 1..20: mol_type = other RNA
atcagttgaacaccttaaga

SEQ ID NO: 1691 - RNA, 20 nt, synthetic construct
  misc_feature 1..20: note = spacer sequence
  source 1..20: mol_type = other RNA
gttgaacaccttaagagaaa

SEQ ID NO: 1692 - RNA, 20 nt, synthetic construct
  misc_feature 1..20: note = spacer sequence
  source 1..20: mol_type = other RNA
actgatagataccgcatacc

SEQ ID NO: 1693 - RNA, 20 nt, synthetic construct
  misc_feature 1..20: note = spacer sequence
  source 1..20: mol_type = other RNA
taaggtgttcaactgataga

SEQ ID NO: 1694 - RNA, 20 nt, synthetic construct
  misc_feature 1..20: note = spacer sequence
  source 1..20: mol_type = other RNA
cttaaggtgttcaactgata

SEQ ID NO: 1695 - RNA, 20 nt, synthetic construct
  misc_feature 1..20: note = spacer sequence
  source 1..20: mol_type = other RNA
tttctcttaaggtgttcaac

SEQ ID NO: 1696 - RNA, 20 nt, synthetic construct
  misc_feature 1..20: note = spacer sequence
  source 1..20: mol_type = other RNA
gtcttttctcttaaggtgtt

SEQ ID NO: 1697 - RNA, 20 nt, synthetic construct
  misc_feature 1..20: note = spacer sequence
  source 1..20: mol_type = other RNA
cctgaagaggagggaattct

SEQ ID NO: 1698 - RNA, 20 nt, synthetic construct
  misc_feature 1..20: note = spacer sequence
  source 1..20: mol_type = other RNA
ggggacatcagtcttttctc

SEQ ID NO: 1699 - RNA, 20 nt, synthetic construct
  misc_feature 1..20: note = spacer sequence
  source 1..20: mol_type = other RNA
tcaggggacatcagtctttt

SEQ ID NO: 1700 - RNA, 20 nt, synthetic construct
  misc_feature 1..20: note = spacer sequence
  source 1..20: mol_type = other RNA
tcttcaggggacatcagtct

SEQ ID NO: 1701 - RNA, 20 nt, synthetic construct
  misc_feature 1..20: note = spacer sequence
  source 1..20: mol_type = other RNA
ctcctcttcaggggacatca

SEQ ID NO: 1702 - RNA, 20 nt, synthetic construct
  misc_feature 1..20: note = spacer sequence
  source 1..20: mol_type = other RNA
gtctccagcctaccttggga

SEQ ID NO: 1703 - RNA, 20 nt, synthetic construct
  misc_feature 1..20: note = spacer sequence
  source 1..20: mol_type = other RNA
ccagcctaccttgggactga

SEQ ID NO: 1704 - RNA, 20 nt, synthetic construct
  misc_feature 1..20: note = spacer sequence
  source 1..20: mol_type = other RNA
agcctaccttgggactgaag

SEQ ID NO: 1705 - RNA, 20 nt, synthetic construct
  misc_feature 1..20: note = spacer sequence
  source 1..20: mol_type = other RNA
caaaaaaaaataaaaagaaa

SEQ ID NO: 1706 - RNA, 20 nt, synthetic construct
  misc_feature 1..20: note = spacer sequence
  source 1..20: mol_type = other RNA
gtctcaaaaaaaaataaaaa

SEQ ID NO: 1707 - RNA, 20 nt, synthetic construct
  misc_feature 1..20: note = spacer sequence
  source 1..20: mol_type = other RNA
tgctctgtcgcccaggctgg

SEQ ID NO: 1708 - RNA, 20 nt, synthetic construct
  misc_feature 1..20: note = spacer sequence
  source 1..20: mol_type = other RNA
gtcgcccaggctggagtgca

SEQ ID NO: 1709 - RNA, 20 nt, synthetic construct
  misc_feature 1..20: note = spacer sequence
  source 1..20: mol_type = other RNA
cccaggctggagtgcagtgg

SEQ ID NO: 1710 - RNA, 20 nt, synthetic construct
  misc_feature 1..20: note = spacer sequence
  source 1..20: mol_type = other RNA
agcctgggcgacagagcagg

SEQ ID NO: 1711 - RNA, 20 nt, synthetic construct
  misc_feature 1..20: note = spacer sequence
  source 1..20: mol_type = other RNA
tgccactgcactccagcctg

SEQ ID NO: 1712 - RNA, 20 nt, synthetic construct
  misc_feature 1..20: note = spacer sequence
  source 1..20: mol_type = other RNA
tggctcactgcaacctctgc

SEQ ID NO: 1713 - RNA, 20 nt, synthetic construct
  misc_feature 1..20: note = spacer sequence
  source 1..20: mol_type = other RNA
ctgcaacctctgcctcccag

SEQ ID NO: 1714 - RNA, 20 nt, synthetic construct
  misc_feature 1..20: note = spacer sequence
  source 1..20: mol_type = other RNA
gcctcccaggttcaagcgat

SEQ ID NO: 1715 - RNA, 20 nt, synthetic construct
  misc_feature 1..20: note = spacer sequence
  source 1..20: mol_type = other RNA
caggttcaagcgattctcct

SEQ ID NO: 1716 - RNA, 20 nt, synthetic construct
  misc_feature 1..20: note = spacer sequence
  source 1..20: mol_type = other RNA
agcgattctcctgcctcagc

SEQ ID NO: 1717 - RNA, 20 nt, synthetic construct
  misc_feature 1..20: note = spacer sequence
  source 1..20: mol_type = other RNA
cttgaacctgggaggcagag

SEQ ID NO: 1718 - RNA, 20 nt, synthetic construct
  misc_feature 1..20: note = spacer sequence
  source 1..20: mol_type = other RNA
cctgcctcagcctcccaagt

SEQ ID NO: 1719 - RNA, 20 nt, synthetic construct
  misc_feature 1..20: note = spacer sequence
  source 1..20: mol_type = other RNA
gccggcaaaatggctgttct

SEQ ID NO: 1720 - RNA, 20 nt, synthetic construct
  misc_feature 1..20: note = spacer sequence
  source 1..20: mol_type = other RNA
gctttctcaggaacttagtt

SEQ ID NO: 1721 - RNA, 20 nt, synthetic construct
  misc_feature 1..20: note = spacer sequence
  source 1..20: mol_type = other RNA
caggaacttagttattacta

SEQ ID NO: 1722 - RNA, 20 nt, synthetic construct
  misc_feature 1..20: note = spacer sequence
  source 1..20: mol_type = other RNA
ggaacttagttattactatt

SEQ ID NO: 1723 - RNA, 20 nt, synthetic construct
  misc_feature 1..20: note = spacer sequence
  source 1..20: mol_type = other RNA
tgagaaagcagactgctgtt

SEQ ID NO: 1724 - RNA, 20 nt, synthetic construct
  misc_feature 1..20: note = spacer sequence
  source 1..20: mol_type = other RNA
aataatagtaataactaagt

SEQ ID NO: 1725 - RNA, 20 nt, synthetic construct
  misc_feature 1..20: note = spacer sequence
  source 1..20: mol_type = other RNA
caaataatagtaataactaa

SEQ ID NO: 1726 - RNA, 20 nt, synthetic construct
  misc_feature 1..20: note = spacer sequence
  source 1..20: mol_type = other RNA
cactctgtcacccaggctgg

SEQ ID NO: 1727 - RNA, 20 nt, synthetic construct
  misc_feature 1..20: note = spacer sequence
  source 1..20: mol_type = other RNA
ccgctcttagagatgaacat

SEQ ID NO: 1728 - RNA, 20 nt, synthetic construct
  misc_feature 1..20: note = spacer sequence
  source 1..20: mol_type = other RNA
gctcttagagatgaacatat

SEQ ID NO: 1729 - RNA, 20 nt, synthetic construct
  misc_feature 1..20: note = spacer sequence
  source 1..20: mol_type = other RNA
tagagatgaacatattgctg

SEQ ID NO: 1730 - RNA, 20 nt, synthetic construct
  misc_feature 1..20: note = spacer sequence
  source 1..20: mol_type = other RNA
aagagcggagaaaaggacta

SEQ ID NO: 1731 - RNA, 20 nt, synthetic construct
  misc_feature 1..20: note = spacer sequence
  source 1..20: mol_type = other RNA
ctaagagcggagaaaaggac

SEQ ID NO: 1732 - RNA, 20 nt, synthetic construct
  misc_feature 1..20: note = spacer sequence
  source 1..20: mol_type = other RNA
tctctaagagcggagaaaag

SEQ ID NO: 1733 - RNA, 20 nt, synthetic construct
  misc_feature 1..20: note = spacer sequence
  source 1..20: mol_type = other RNA
gtgtgtttgttttcagttga

SEQ ID NO: 1734 - RNA, 20 nt, synthetic construct
  misc_feature 1..20: note = spacer sequence
  source 1..20: mol_type = other RNA
gttgagcatcagttgaagga

SEQ ID NO: 1735 - RNA, 20 nt, synthetic construct
  misc_feature 1..20: note = spacer sequence
  source 1..20: mol_type = other RNA
actgaaaacaaacacacaga

SEQ ID NO: 1736 - RNA, 20 nt, synthetic construct
  misc_feature 1..20: note = spacer sequence
  source 1..20: mol_type = other RNA
gttgaaggaattgcttggtt

SEQ ID NO: 1737 - RNA, 20 nt, synthetic construct
  misc_feature 1..20: note = spacer sequence
  source 1..20: mol_type = other RNA
actgatgctcaactgaaaac

SEQ ID NO: 1738 - RNA, 20 nt, synthetic construct
  misc_feature 1..20: note = spacer sequence
  source 1..20: mol_type = other RNA
ttcaactgatgctcaactga

SEQ ID NO: 1739 - RNA, 20 nt, synthetic construct
  misc_feature 1..20: note = spacer sequence
  source 1..20: mol_type = other RNA
tgtccagtaagaatgagggc

SEQ ID NO: 1740 - RNA, 20 nt, synthetic construct
  misc_feature 1..20: note = spacer sequence
  source 1..20: mol_type = other RNA
agtaagaatgagggcctggc

SEQ ID NO: 1741 - RNA, 20 nt, synthetic construct
  misc_feature 1..20: note = spacer sequence
  source 1..20: mol_type = other RNA
tactggacaggagagttgca

SEQ ID NO: 1742 - RNA, 20 nt, synthetic construct
  misc_feature 1..20: note = spacer sequence
  source 1..20: mol_type = other RNA
ttcttactggacaggagagt

SEQ ID NO: 1743 - RNA, 20 nt, synthetic construct
  misc_feature 1..20: note = spacer sequence
  source 1..20: mol_type = other RNA
gatttcactaaacacatttc

SEQ ID NO: 1744 - RNA, 20 nt, synthetic construct
  misc_feature 1..20: note = spacer sequence
  source 1..20: mol_type = other RNA
gacagtaggccaggccctca

SEQ ID NO: 1745 - RNA, 20 nt, synthetic construct
  misc_feature 1..20: note = spacer sequence
  source 1..20: mol_type = other RNA
ctaaacacatttctggacag

SEQ ID NO: 1746 - RNA, 20 nt, synthetic construct
  misc_feature 1..20: note = spacer sequence
  source 1..20: mol_type = other RNA
ggacagtggtgtgcattaag

SEQ ID NO: 1747 - RNA, 20 nt, synthetic construct
  misc_feature 1..20: note = spacer sequence
  source 1..20: mol_type = other RNA
agaaatgtgtttagtgaaat

SEQ ID NO: 1748 - RNA, 20 nt, synthetic construct
  misc_feature 1..20: note = spacer sequence
  source 1..20: mol_type = other RNA
taatgcacaccactgtccag

SEQ ID NO: 1749 - RNA, 20 nt, synthetic construct
  misc_feature 1..20: note = spacer sequence
  source 1..20: mol_type = other RNA
cttcataaccctccccaaac

SEQ ID NO: 1750 - RNA, 20 nt, synthetic construct
  misc_feature 1..20: note = spacer sequence
  source 1..20: mol_type = other RNA
tcataaccctccccaaacga

SEQ ID NO: 1751 - RNA, 20 nt, synthetic construct
  misc_feature 1..20: note = spacer sequence
  source 1..20: mol_type = other RNA
taaccctccccaaacgagtc

SEQ ID NO: 1752 - RNA, 20 nt, synthetic construct
  misc_feature 1..20: note = spacer sequence
  source 1..20: mol_type = other RNA
ccaaacgagtcttcagtcat

SEQ ID NO: 1753 - RNA, 20 nt, synthetic construct
  misc_feature 1..20: note = spacer sequence
  source 1..20: mol_type = other RNA
tttggggagggttatgaaga

SEQ ID NO: 1754 - RNA, 20 nt, synthetic construct
  misc_feature 1..20: note = spacer sequence
  source 1..20: mol_type = other RNA
tcagtcatttgagtttgcat

SEQ ID NO: 1755 - RNA, 20 nt, synthetic construct
  misc_feature 1..20: note = spacer sequence
  source 1..20: mol_type = other RNA
gtcatttgagtttgcatagc

SEQ ID NO: 1756 - RNA, 20 nt, synthetic construct
  misc_feature 1..20: note = spacer sequence
  source 1..20: mol_type = other RNA
tttgagtttgcatagcaatg

SEQ ID NO: 1757 - RNA, 20 nt, synthetic construct
  misc_feature 1..20: note = spacer sequence
  source 1..20: mol_type = other RNA
aatgactgaagactcgtttg

SEQ ID NO: 1758 - RNA, 20 nt, synthetic construct
  misc_feature 1..20: note = spacer sequence
  source 1..20: mol_type = other RNA
gcctcccacgttcaagcact

SEQ ID NO: 1759 - RNA, 20 nt, synthetic construct
  misc_feature 1..20: note = spacer sequence
  source 1..20: mol_type = other RNA
cacgttcaagcacttctcct

SEQ ID NO: 1760 - RNA, 20 nt, synthetic construct
  misc_feature 1..20: note = spacer sequence
  source 1..20: mol_type = other RNA
agcacttctcctgcctcagc

SEQ ID NO: 1761 - RNA, 20 nt, synthetic construct
  misc_feature 1..20: note = spacer sequence
  source 1..20: mol_type = other RNA
cctgcctcagcctcccaagt

SEQ ID NO: 1762 - RNA, 20 nt, synthetic construct
  misc_feature 1..20: note = spacer sequence
  source 1..20: mol_type = other RNA
tgcctcagcctcccaagtag

SEQ ID NO: 1763 - RNA, 20 nt, synthetic construct
  misc_feature 1..20: note = spacer sequence
  source 1..20: mol_type = other RNA
gcctcccaagtagctgagat

SEQ ID NO: 1764 - RNA, 20 nt, synthetic construct
  misc_feature 1..20: note = spacer sequence
  source 1..20: mol_type = other RNA
caagtagctgagattacaga

SEQ ID NO: 1765 - RNA, 20 nt, synthetic construct
  misc_feature 1..20: note = spacer sequence
  source 1..20: mol_type = other RNA
gctacttgggaggctgaggc

SEQ ID NO: 1766 - RNA, 20 nt, synthetic construct
  misc_feature 1..20: note = spacer sequence
  source 1..20: mol_type = other RNA
cagctacttgggaggctgag

SEQ ID NO: 1767 - RNA, 20 nt, synthetic construct
  misc_feature 1..20: note = spacer sequence
  source 1..20: mol_type = other RNA
gtaatctcagctacttggga

SEQ ID NO: 1768 - RNA, 20 nt, synthetic construct
  misc_feature 1..20: note = spacer sequence
  source 1..20: mol_type = other RNA
actaaaaatacaaaaagtag

SEQ ID NO: 1769 - RNA, 20 nt, synthetic construct
  misc_feature 1..20: note = spacer sequence
  source 1..20: mol_type = other RNA
ctactaaaaatacaaaaagt

SEQ ID NO: 1770 - RNA, 20 nt, synthetic construct
  misc_feature 1..20: note = spacer sequence
  source 1..20: mol_type = other RNA
ccatgttgaccaggctggtc

SEQ ID NO: 1771 - RNA, 20 nt, synthetic construct
  misc_feature 1..20: note = spacer sequence
  source 1..20: mol_type = other RNA
acatggtgaaaccccatctc

SEQ ID NO: 1772 - RNA, 20 nt, synthetic construct
  misc_feature 1..20: note = spacer sequence
  source 1..20: mol_type = other RNA
tgaactcctgacctcaagtg

SEQ ID NO: 1773 - RNA, 20 nt, synthetic construct
  misc_feature 1..20: note = spacer sequence
  source 1..20: mol_type = other RNA
agaccagcctggtcaacatg

SEQ ID NO: 1774 - RNA, 20 nt, synthetic construct
  misc_feature 1..20: note = spacer sequence
  source 1..20: mol_type = other RNA
tgacctcaagtgaggaggcc

SEQ ID NO: 1775 - RNA, 20 nt, synthetic construct
  misc_feature 1..20: note = spacer sequence
  source 1..20: mol_type = other RNA
ggagttcaagaccagcctgg

SEQ ID NO: 1776 - RNA, 20 nt, synthetic construct
  misc_feature 1..20: note = spacer sequence
  source 1..20: mol_type = other RNA
tataataaataatattcaca

SEQ ID NO: 1777 - RNA, 20 nt, synthetic construct
  misc_feature 1..20: note = spacer sequence
  source 1..20: mol_type = other RNA
tagcagctgctaccacagtg

SEQ ID NO: 1778 - RNA, 20 nt, synthetic construct
  misc_feature 1..20: note = spacer sequence
  source 1..20: mol_type = other RNA
gtgatccttgcctccttgtg

SEQ ID NO: 1779 - RNA, 20 nt, synthetic construct
  misc_feature 1..20: note = spacer sequence
  source 1..20: mol_type = other RNA
ctgagggccatcttagcagc

SEQ ID NO: 1780 - RNA, 20 nt, synthetic construct
  misc_feature 1..20: note = spacer sequence
  source 1..20: mol_type = other RNA
ttgcctccttgtgtgaaaaa

SEQ ID NO: 1781 - RNA, 20 nt, synthetic construct
  misc_feature 1..20: note = spacer sequence
  source 1..20: mol_type = other RNA
ttgtgtgaaaaaggggttta

SEQ ID NO: 1782 - RNA, 20 nt, synthetic construct
  misc_feature 1..20: note = spacer sequence
  source 1..20: mol_type = other RNA
cacaaggaggcaaggatcac

SEQ ID NO: 1783 - RNA, 20 nt, synthetic construct
  misc_feature 1..20: note = spacer sequence
  source 1..20: mol_type = other RNA
gtgtgtccccccccagtatt

SEQ ID NO: 1784 - RNA, 20 nt, synthetic construct
  misc_feature 1..20: note = spacer sequence
  source 1..20: mol_type = other RNA
ccccccagtattggctgacc

SEQ ID NO: 1785 - RNA, 20 nt, synthetic construct
  misc_feature 1..20: note = spacer sequence
  source 1..20: mol_type = other RNA
gccaatactggggggggaca

SEQ ID NO: 1786 - RNA, 20 nt, synthetic construct
  misc_feature 1..20: note = spacer sequence
  source 1..20: mol_type = other RNA
ccacaatggtcagccaatac

SEQ ID NO: 1787 - RNA, 20 nt, synthetic construct
  misc_feature 1..20: note = spacer sequence
  source 1..20: mol_type = other RNA
attcaccacaatggtcagcc

SEQ ID NO: 1788 - RNA, 20 nt, synthetic construct
  misc_feature 1..20: note = spacer sequence
  source 1..20: mol_type = other RNA
gggaaaatgatagtgtgggg

SEQ ID NO: 1789 - RNA, 20 nt, synthetic construct
  misc_feature 1..20: note = spacer sequence
  source 1..20: mol_type = other RNA
cagaattctattcaccacaa

SEQ ID NO: 1790 - RNA, 20 nt, synthetic construct
  misc_feature 1..20: note = spacer sequence
  source 1..20: mol_type = other RNA
ttttcccagaattctattca

SEQ ID NO: 1791 - RNA, 20 nt, synthetic construct
  misc_feature 1..20: note = spacer sequence
  source 1..20: mol_type = other RNA
gccccacactatcattttcc

SEQ ID NO: 1792 - RNA, 20 nt, synthetic construct
  misc_feature 1..20: note = spacer sequence
  source 1..20: mol_type = other RNA
gctctgtgtccccacccaaa

SEQ ID NO: 1793 - RNA, 20 nt, synthetic construct
  misc_feature 1..20: note = spacer sequence
  source 1..20: mol_type = other RNA
gtgtccccacccaaatctca

SEQ ID NO: 1794 - RNA, 20 nt, synthetic construct
  misc_feature 1..20: note = spacer sequence
  source 1..20: mol_type = other RNA
ccacccaaatctcatctcaa

SEQ ID NO: 1795 - RNA, 20 nt, synthetic construct
  misc_feature 1..20: note = spacer sequence
  source 1..20: mol_type = other RNA
catctcaaattgtaatcccc

SEQ ID NO: 1796 - RNA, 20 nt, synthetic construct
  misc_feature 1..20: note = spacer sequence
  source 1..20: mol_type = other RNA
tctcaaattgtaatccccat

SEQ ID NO: 1797 - RNA, 20 nt, synthetic construct
  misc_feature 1..20: note = spacer sequence
  source 1..20: mol_type = other RNA
caaattgtaatccccatatg

SEQ ID NO: 1798 - RNA, 20 nt, synthetic construct
  misc_feature 1..20: note = spacer sequence
  source 1..20: mol_type = other RNA
aattgtaatccccatatgtc

SEQ ID NO: 1799 - RNA, 20 nt, synthetic construct
  misc_feature 1..20: note = spacer sequence
  source 1..20: mol_type = other RNA
ccatatgtcaagggagtgac

SEQ ID NO: 1800 - RNA, 20 nt, synthetic construct
  misc_feature 1..20: note = spacer sequence
  source 1..20: mol_type = other RNA
agggagtgactggatgggag

SEQ ID NO: 1801 - RNA, 20 nt, synthetic construct
  misc_feature 1..20: note = spacer sequence
  source 1..20: mol_type = other RNA
cttgacatatggggattaca

SEQ ID NO: 1802 - RNA, 20 nt, synthetic construct
  misc_feature 1..20: note = spacer sequence
  source 1..20: mol_type = other RNA
ctcccttgacatatggggat

SEQ ID NO: 1803 - RNA, 20 nt, synthetic construct
  misc_feature 1..20: note = spacer sequence
  source 1..20: mol_type = other RNA
agtcactcccttgacatatg

SEQ ID NO: 1804 - RNA, 20 nt, synthetic construct
  misc_feature 1..20: note = spacer sequence
  source 1..20: mol_type = other RNA
catccagtcactcccttgac

SEQ ID NO: 1805 - RNA, 20 nt, synthetic construct
  misc_feature 1..20: note = spacer sequence
  source 1..20: mol_type = other RNA
ctcatcctgttgtcatgata

SEQ ID NO: 1806 - RNA, 20 nt, synthetic construct
  misc_feature 1..20: note = spacer sequence
  source 1..20: mol_type = other RNA
tcctgttgtcatgatagtga

SEQ ID NO: 1807 - RNA, 20 nt, synthetic construct
  misc_feature 1..20: note = spacer sequence
  source 1..20: mol_type = other RNA
tgttgtcatgatagtgagtg

SEQ ID NO: 1808 - RNA, 20 nt, synthetic construct
  misc_feature 1..20: note = spacer sequence
  source 1..20: mol_type = other RNA
tgatagtgagtggcttctca

SEQ ID NO: 1809 - RNA, 20 nt, synthetic construct
  misc_feature 1..20: note = spacer sequence
  source 1..20: mol_type = other RNA
tgacaacaggatgagggaac

SEQ ID NO: 1810 - RNA, 20 nt, synthetic construct
  misc_feature 1..20: note = spacer sequence
  source 1..20: mol_type = other RNA
ctatcatgacaacaggatga

SEQ ID NO: 1811 - RNA, 20 nt, synthetic construct
  misc_feature 1..20: note = spacer sequence
  source 1..20: mol_type = other RNA
catgagatctgatgctttta

SEQ ID NO: 1812 - RNA, 20 nt, synthetic construct
  misc_feature 1..20: note = spacer sequence
  source 1..20: mol_type = other RNA
tgagatctgatgcttttaga

SEQ ID NO: 1813 - RNA, 20 nt, synthetic construct
  misc_feature 1..20: note = spacer sequence
  source 1..20: mol_type = other RNA
tgagaagccactcactatca

SEQ ID NO: 1814 - RNA, 20 nt, synthetic construct
  misc_feature 1..20: note = spacer sequence
  source 1..20: mol_type = other RNA
catgagaagccactcactat

SEQ ID NO: 1815 - RNA, 20 nt, synthetic construct
  misc_feature 1..20: note = spacer sequence
  source 1..20: mol_type = other RNA
gatgcttttagaagtgtttg

SEQ ID NO: 1816 - RNA, 20 nt, synthetic construct
  misc_feature 1..20: note = spacer sequence
  source 1..20: mol_type = other RNA
gatctcatgagaagccactc

SEQ ID NO: 1817 - RNA, 20 nt, synthetic construct
  misc_feature 1..20: note = spacer sequence
  source 1..20: mol_type = other RNA
aaaagcatcagatctcatga

SEQ ID NO: 1818 - RNA, 20 nt, synthetic construct
  misc_feature 1..20: note = spacer sequence
  source 1..20: mol_type = other RNA
tccttcactatttctctttt

SEQ ID NO: 1819 - RNA, 20 nt, synthetic construct
  misc_feature 1..20: note = spacer sequence
  source 1..20: mol_type = other RNA
ttcactatttctcttttcct

SEQ ID NO: 1820 - RNA, 20 nt, synthetic construct
  misc_feature 1..20: note = spacer sequence
  source 1..20: mol_type = other RNA
ctatttctcttttcctgcca

SEQ ID NO: 1821 - RNA, 20 nt, synthetic construct
  misc_feature 1..20: note = spacer sequence
  source 1..20: mol_type = other RNA
cttttcctgccaccttgtga

SEQ ID NO: 1822 - RNA, 20 nt, synthetic construct
  misc_feature 1..20: note = spacer sequence
  source 1..20: mol_type = other RNA
tttcctgccaccttgtgaag

SEQ ID NO: 1823 - RNA, 20 nt, synthetic construct
  misc_feature 1..20: note = spacer sequence
  source 1..20: mol_type = other RNA
tgccaccttgtgaagaaaat

SEQ ID NO: 1824 - RNA, 20 nt, synthetic construct
  misc_feature 1..20: note = spacer sequence
  source 1..20: mol_type = other RNA
caaggtggcaggaaaagaga

SEQ ID NO: 1825 - RNA, 20 nt, synthetic construct
  misc_feature 1..20: note = spacer sequence
  source 1..20: mol_type = other RNA
tcacaaggtggcaggaaaag

SEQ ID NO: 1826 - RNA, 20 nt, synthetic construct
  misc_feature 1..20: note = spacer sequence
  source 1..20: mol_type = other RNA
cctttgccttccaccatgat

SEQ ID NO: 1827 - RNA, 20 nt, synthetic construct
  misc_feature 1..20: note = spacer sequence
  source 1..20: mol_type = other RNA
tttgccttccaccatgattg

SEQ ID NO: 1828 - RNA, 20 nt, synthetic construct
  misc_feature 1..20: note = spacer sequence
  source 1..20: mol_type = other RNA
accatgattgtaagtttcct

SEQ ID NO: 1829 - RNA, 20 nt, synthetic construct
  misc_feature 1..20: note = spacer sequence
  source 1..20: mol_type = other RNA
tgaggcctccccagccatgc

SEQ ID NO: 1830 - RNA, 20 nt, synthetic construct
  misc_feature 1..20: note = spacer sequence
  source 1..20: mol_type = other RNA
ggaaacttacaatcatggtg

SEQ ID NO: 1831 - RNA, 20 nt, synthetic construct
  misc_feature 1..20: note = spacer sequence
  source 1..20: mol_type = other RNA
ccagccatgcagccatgcaa

SEQ ID NO: 1832 - RNA, 20 nt, synthetic construct
  misc_feature 1..20: note = spacer sequence
  source 1..20: mol_type = other RNA
ttcctttataaattacccag

SEQ ID NO: 1833 - RNA, 20 nt, synthetic construct
  misc_feature 1..20: note = spacer sequence
  source 1..20: mol_type = other RNA
tttataaattacccagtctc

SEQ ID NO: 1834 - RNA, 20 nt, synthetic construct
  misc_feature 1..20: note = spacer sequence
  source 1..20: mol_type = other RNA
caagtatttctttatagcag

SEQ ID NO: 1835 - RNA, 20 nt, synthetic construct
  misc_feature 1..20: note = spacer sequence
  source 1..20: mol_type = other RNA
agtatttctttatagcagtg

SEQ ID NO: 1836 - RNA, 20 nt, synthetic construct
  misc_feature 1..20: note = spacer sequence
  source 1..20: mol_type = other RNA
ttatagcagtgtgaaaatgg

SEQ ID NO: 1837 - RNA, 20 nt, synthetic construct
  misc_feature 1..20: note = spacer sequence
  source 1..20: mol_type = other RNA
cactgctataaagaaatact

SEQ ID NO: 1838 - RNA, 20 nt, synthetic construct
  misc_feature 1..20: note = spacer sequence
  source 1..20: mol_type = other RNA
attttcacactgctataaag

SEQ ID NO: 1839 - RNA, 20 nt, synthetic construct
  misc_feature 1..20: note = spacer sequence
  source 1..20: mol_type = other RNA
gtattagtccattttcacac

SEQ ID NO: 1840 - RNA, 20 nt, synthetic construct
  misc_feature 1..20: note = spacer sequence
  source 1..20: mol_type = other RNA
agggctaagtcatcaaagac

SEQ ID NO: 1841 - RNA, 20 nt, synthetic construct
  misc_feature 1..20: note = spacer sequence
  source 1..20: mol_type = other RNA
tcaaagacattgtggcttcc

SEQ ID NO: 1842 - RNA, 20 nt, synthetic construct
  misc_feature 1..20: note = spacer sequence
  source 1..20: mol_type = other RNA
aagacattgtggcttccgtc

SEQ ID NO: 1843 - RNA, 20 nt, synthetic construct
  misc_feature 1..20: note = spacer sequence
  source 1..20: mol_type = other RNA
ttgatgacttagccctggaa

SEQ ID NO: 1844 - RNA, 20 nt, synthetic construct
  misc_feature 1..20: note = spacer sequence
  source 1..20: mol_type = other RNA
gtcttgctctcttggattac

SEQ ID NO: 1845 - RNA, 20 nt, synthetic construct
  misc_feature 1..20: note = spacer sequence
  source 1..20: mol_type = other RNA
tgctctcttggattactcat

SEQ ID NO: 1846 - RNA, 20 nt, synthetic construct
  misc_feature 1..20: note = spacer sequence
  source 1..20: mol_type = other RNA
cttggattactcattctgag

SEQ ID NO: 1847 - RNA, 20 nt, synthetic construct
  misc_feature 1..20: note = spacer sequence
  source 1..20: mol_type = other RNA
tggattactcattctgaggg

SEQ ID NO: 1848 - RNA, 20 nt, synthetic construct
  misc_feature 1..20: note = spacer sequence
  source 1..20: mol_type = other RNA
aagagagcaagacggaagcc

SEQ ID NO: 1849 - RNA, 20 nt, synthetic construct
  misc_feature 1..20: note = spacer sequence
  source 1..20: mol_type = other RNA
ttctgagggaagccagctgc

SEQ ID NO: 1850 - RNA, 20 nt, synthetic construct
  misc_feature 1..20: note = spacer sequence
  source 1..20: mol_type = other RNA
gagggaagccagctgccatg

SEQ ID NO: 1851 - RNA, 20 nt, synthetic construct
  misc_feature 1..20: note = spacer sequence
  source 1..20: mol_type = other RNA
gaatgagtaatccaagagag

SEQ ID NO: 1852 - RNA, 20 nt, synthetic construct
  misc_feature 1..20: note = spacer sequence
  source 1..20: mol_type = other RNA
ctcagaatgagtaatccaag

SEQ ID NO: 1853 - RNA, 20 nt, synthetic construct
  misc_feature 1..20: note = spacer sequence
  source 1..20: mol_type = other RNA
gtgcaccttctgagaggctc

SEQ ID NO: 1854 - RNA, 20 nt, synthetic construct
  misc_feature 1..20: note = spacer sequence
  source 1..20: mol_type = other RNA
gagaggctcatgcagagagg

SEQ ID NO: 1855 - RNA, 20 nt, synthetic construct
  misc_feature 1..20: note = spacer sequence
  source 1..20: mol_type = other RNA
gaaggtgcactgagtggcct

SEQ ID NO: 1856 - RNA, 20 nt, synthetic construct
  misc_feature 1..20: note = spacer sequence
  source 1..20: mol_type = other RNA
cagaaggtgcactgagtggc

SEQ ID NO: 1857 - RNA, 20 nt, synthetic construct
  misc_feature 1..20: note = spacer sequence
  source 1..20: mol_type = other RNA
tgcagagaggacctgaggcc

SEQ ID NO: 1858 - RNA, 20 nt, synthetic construct
  misc_feature 1..20: note = spacer sequence
  source 1..20: mol_type = other RNA
gcatgagcctctcagaaggt

SEQ ID NO: 1859 - RNA, 20 nt, synthetic construct
  misc_feature 1..20: note = spacer sequence
  source 1..20: mol_type = other RNA
ctgcatgagcctctcagaag

SEQ ID NO: 1860 - RNA, 20 nt, synthetic construct
  misc_feature 1..20: note = spacer sequence
  source 1..20: mol_type = other RNA
tctctgcatgagcctctcag

SEQ ID NO: 1861 - RNA, 20 nt, synthetic construct
  misc_feature 1..20: note = spacer sequence
  source 1..20: mol_type = other RNA
ggtcctctctgcatgagcct

SEQ ID NO: 1862 - RNA, 20 nt, synthetic construct
  misc_feature 1..20: note = spacer sequence
  source 1..20: mol_type = other RNA
catcaacagccagcaccaaa

SEQ ID NO: 1863 - RNA, 20 nt, synthetic construct
  misc_feature 1..20: note = spacer sequence
  source 1..20: mol_type = other RNA
acagccagcaccaaaatacc

SEQ ID NO: 1864 - RNA, 20 nt, synthetic construct
  misc_feature 1..20: note = spacer sequence
  source 1..20: mol_type = other RNA
tttataaaaccccttacatt

SEQ ID NO: 1865 - RNA, 20 nt, synthetic construct
  misc_feature 1..20: note = spacer sequence
  source 1..20: mol_type = other RNA
agctcatttataaaacccct

SEQ ID NO: 1866 - RNA, 20 nt, synthetic construct
  misc_feature 1..20: note = spacer sequence
  source 1..20: mol_type = other RNA
tcaagctcatttataaaacc

SEQ ID NO: 1867 - RNA, 20 nt, synthetic construct
  misc_feature 1..20: note = spacer sequence
  source 1..20: mol_type = other RNA
gatttacatagggcatgaaa

SEQ ID NO: 1868 - RNA, 20 nt, synthetic construct
  misc_feature 1..20: note = spacer sequence
  source 1..20: mol_type = other RNA
gacagcgcctcctcaagctc

SEQ ID NO: 1869 - RNA, 20 nt, synthetic construct
  misc_feature 1..20: note = spacer sequence
  source 1..20: mol_type = other RNA
tgccctatgtaaatcagaca

SEQ ID NO: 1870 - RNA, 20 nt, synthetic construct
  misc_feature 1..20: note = spacer sequence
  source 1..20: mol_type = other RNA
ttcatgccctatgtaaatca

SEQ ID NO: 1871 - RNA, 20 nt, synthetic construct
  misc_feature 1..20: note = spacer sequence
  source 1..20: mol_type = other RNA
aaccaatctttcatgcccta

SEQ ID NO: 1872 - RNA, 20 nt, synthetic construct
  misc_feature 1..20: note = spacer sequence
  source 1..20: mol_type = other RNA
tttattatgcagatatgttc

SEQ ID NO: 1873 - RNA, 20 nt, synthetic construct
  misc_feature 1..20: note = spacer sequence
  source 1..20: mol_type = other RNA
gcataataaaagattagggt

SEQ ID NO: 1874 - RNA, 20 nt, synthetic construct
  misc_feature 1..20: note = spacer sequence
  source 1..20: mol_type = other RNA
ctggcctgcgccatgttgcc

SEQ ID NO: 1875 - RNA, 20 nt, synthetic construct
  misc_feature 1..20: note = spacer sequence
  source 1..20: mol_type = other RNA
ggcctgcgccatgttgcctg

SEQ ID NO: 1876 - RNA, 20 nt, synthetic construct
  misc_feature 1..20: note = spacer sequence
  source 1..20: mol_type = other RNA
gggaaagtaaaatgctcact

SEQ ID NO: 1877 - RNA, 20 nt, synthetic construct
  misc_feature 1..20: note = spacer sequence
  source 1..20: mol_type = other RNA
ctatcagggaaagtaaaatg

SEQ ID NO: 1878 - RNA, 20 nt, synthetic construct
  misc_feature 1..20: note = spacer sequence
  source 1..20: mol_type = other RNA
ttcactatcagggaaagtaa

SEQ ID NO: 1879 - RNA, 20 nt, synthetic construct
  misc_feature 1..20: note = spacer sequence
  source 1..20: mol_type = other RNA
ttcctttttcttcctatttg

SEQ ID NO: 1880 - RNA, 20 nt, synthetic construct
  misc_feature 1..20: note = spacer sequence
  source 1..20: mol_type = other RNA
tttttcttcctatttgttct

SEQ ID NO: 1881 - RNA, 20 nt, synthetic construct
  misc_feature 1..20: note = spacer sequence
  source 1..20: mol_type = other RNA
tcctatttgttctttggtgt

SEQ ID NO: 1882 - RNA, 20 nt, synthetic construct
  misc_feature 1..20: note = spacer sequence
  source 1..20: mol_type = other RNA
tatttgttctttggtgtcac

SEQ ID NO: 1883 - RNA, 20 nt, synthetic construct
  misc_feature 1..20: note = spacer sequence
  source 1..20: mol_type = other RNA
ttggtgtcactctgattcat

SEQ ID NO: 1884 - RNA, 20 nt, synthetic construct
  misc_feature 1..20: note = spacer sequence
  source 1..20: mol_type = other RNA
ctctgattcatggattcttg

SEQ ID NO: 1885 - RNA, 20 nt, synthetic construct
  misc_feature 1..20: note = spacer sequence
  source 1..20: mol_type = other RNA
gattcatggattcttgtttt

SEQ ID NO: 1886 - RNA, 20 nt, synthetic construct
  misc_feature 1..20: note = spacer sequence
  source 1..20: mol_type = other RNA
gagtgacaccaaagaacaaa

SEQ ID NO: 1887 - RNA, 20 nt, synthetic construct
  misc_feature 1..20: note = spacer sequence
  source 1..20: mol_type = other RNA
tggattcttgttttaatcaa

SEQ ID NO: 1888 - RNA, 20 nt, synthetic construct
  misc_feature 1..20: note = spacer sequence
  source 1..20: mol_type = other RNA
atgaatcagagtgacaccaa

SEQ ID NO: 1889 - RNA, 20 nt, synthetic construct
  misc_feature 1..20: note = spacer sequence
  source 1..20: mol_type = other RNA
tgttttaatcaaatgtaata

SEQ ID NO: 1890 - RNA, 20 nt, synthetic construct
  misc_feature 1..20: note = spacer sequence
  source 1..20: mol_type = other RNA
aatgtaatattataccgata

SEQ ID NO: 1891 - RNA, 20 nt, synthetic construct
  misc_feature 1..20: note = spacer sequence
  source 1..20: mol_type = other RNA
ggatatcactctgtgtcagt

SEQ ID NO: 1892 - RNA, 20 nt, synthetic construct
  misc_feature 1..20: note = spacer sequence
  source 1..20: mol_type = other RNA
agaatatattgttaggttaa

SEQ ID NO: 1893 - RNA, 20 nt, synthetic construct
  misc_feature 1..20: note = spacer sequence
  source 1..20: mol_type = other RNA
ctctgtgtcagttcatagag

SEQ ID NO: 1894 - RNA, 20 nt, synthetic construct
  misc_feature 1..20: note = spacer sequence
  source 1..20: mol_type = other RNA
gtgtcagttcatagagatct

SEQ ID NO: 1895 - RNA, 20 nt, synthetic construct
  misc_feature 1..20: note = spacer sequence
  source 1..20: mol_type = other RNA
gttcatagagatcttcattg

SEQ ID NO: 1896 - RNA, 20 nt, synthetic construct
  misc_feature 1..20: note = spacer sequence
  source 1..20: mol_type = other RNA
tagagatcttcattgttgct

SEQ ID NO: 1897 - RNA, 20 nt, synthetic construct
  misc_feature 1..20: note = spacer sequence
  source 1..20: mol_type = other RNA
atgaactgacacagagtgat

SEQ ID NO: 1898 - RNA, 20 nt, synthetic construct
  misc_feature 1..20: note = spacer sequence
  source 1..20: mol_type = other RNA
ctatgaactgacacagagtg

SEQ ID NO: 1899 - RNA, 20 nt, synthetic construct
  misc_feature 1..20: note = spacer sequence
  source 1..20: mol_type = other RNA
tcattgttgctttttacagt

SEQ ID NO: 1900 - RNA, 20 nt, synthetic construct
  misc_feature 1..20: note = spacer sequence
  source 1..20: mol_type = other RNA
ttgttgctttttacagtgac

SEQ ID NO: 1901 - RNA, 20 nt, synthetic construct
  misc_feature 1..20: note = spacer sequence
  source 1..20: mol_type = other RNA
ctgtaaaaagcaacaatgaa

SEQ ID NO: 1902 - RNA, 20 nt, synthetic construct
  misc_feature 1..20: note = spacer sequence
  source 1..20: mol_type = other RNA
attatgtagacataccataa

SEQ ID NO: 1903 - RNA, 20 nt, synthetic construct
  misc_feature 1..20: note = spacer sequence
  source 1..20: mol_type = other RNA
acataatggaataccatgtc

SEQ ID NO: 1904 - RNA, 20 nt, synthetic construct
  misc_feature 1..20: note = spacer sequence
  source 1..20: mol_type = other RNA
aacaatttcttacatatgga

SEQ ID NO: 1905 - RNA, 20 nt, synthetic construct
  misc_feature 1..20: note = spacer sequence
  source 1..20: mol_type = other RNA
tacatatggacattgaggtt

SEQ ID NO: 1906 - RNA, 20 nt, synthetic construct
  misc_feature 1..20: note = spacer sequence
  source 1..20: mol_type = other RNA
atatgtaagaaattgtttga

SEQ ID NO: 1907 - RNA, 20 nt, synthetic construct
  misc_feature 1..20: note = spacer sequence
  source 1..20: mol_type = other RNA
atgtccatatgtaagaaatt

SEQ ID NO: 1908 - RNA, 20 nt, synthetic construct
  misc_feature 1..20: note = spacer sequence
  source 1..20: mol_type = other RNA
agcataatttgtaattgcaa

SEQ ID NO: 1909 - RNA, 20 nt, synthetic construct
  misc_feature 1..20: note = spacer sequence
  source 1..20: mol_type = other RNA
gatgggcaataggtgcattg

SEQ ID NO: 1910 - RNA, 20 nt, synthetic construct
  misc_feature 1..20: note = spacer sequence
  source 1..20: mol_type = other RNA
gaatggcaaaaactcaaaat

SEQ ID NO: 1911 - RNA, 20 nt, synthetic construct
  misc_feature 1..20: note = spacer sequence
  source 1..20: mol_type = other RNA
gtttatattattatgtaact

SEQ ID NO: 1912 - RNA, 20 nt, synthetic construct
  misc_feature 1..20: note = spacer sequence
  source 1..20: mol_type = other RNA
agttacataataatataaac

SEQ ID NO: 1913 - RNA, 20 nt, synthetic construct
  misc_feature 1..20: note = spacer sequence
  source 1..20: mol_type = other RNA
cccaccatgtgagtggttcc

SEQ ID NO: 1914 - RNA, 20 nt, synthetic construct
  misc_feature 1..20: note = spacer sequence
  source 1..20: mol_type = other RNA
catggtgggtgaatgcaagc

SEQ ID NO: 1915 - RNA, 20 nt, synthetic construct
  misc_feature 1..20: note = spacer sequence
  source 1..20: mol_type = other RNA
taagactttaattttgagaa

SEQ ID NO: 1916 - RNA, 20 nt, synthetic construct
  misc_feature 1..20: note = spacer sequence
  source 1..20: mol_type = other RNA
taggaaccactcacatggtg

SEQ ID NO: 1917 - RNA, 20 nt, synthetic construct
  misc_feature 1..20: note = spacer sequence
  source 1..20: mol_type = other RNA
aaattaaagtcttaggaacc

SEQ ID NO: 1918 - RNA, 20 nt, synthetic construct
  misc_feature 1..20: note = spacer sequence
  source 1..20: mol_type = other RNA
caaaattaaagtcttaggaa

SEQ ID NO: 1919 - RNA, 20 nt, synthetic construct
  misc_feature 1..20: note = spacer sequence
  source 1..20: mol_type = other RNA
actcaggctccaggtcctta

SEQ ID NO: 1920 - RNA, 20 nt, synthetic construct
  misc_feature 1..20: note = spacer sequence
  source 1..20: mol_type = other RNA
ggctccaggtccttattctt

SEQ ID NO: 1921 - RNA, 20 nt, synthetic construct
  misc_feature 1..20: note = spacer sequence
  source 1..20: mol_type = other RNA
aggtccttattcttcagccc

SEQ ID NO: 1922 - RNA, 20 nt, synthetic construct
  misc_feature 1..20: note = spacer sequence
  source 1..20: mol_type = other RNA
ttattcttcagccccgaccc

SEQ ID NO: 1923 - RNA, 20 nt, synthetic construct
  misc_feature 1..20: note = spacer sequence
  source 1..20: mol_type = other RNA
tcagccccgacccctctttc

SEQ ID NO: 1924 - RNA, 20 nt, synthetic construct
  misc_feature 1..20: note = spacer sequence
  source 1..20: mol_type = other RNA
gccccgacccctctttcctc

SEQ ID NO: 1925 - RNA, 20 nt, synthetic construct
  misc_feature 1..20: note = spacer sequence
  source 1..20: mol_type = other RNA
gggctgaagaataaggacct

SEQ ID NO: 1926 - RNA, 20 nt, synthetic construct
  misc_feature 1..20: note = spacer sequence
  source 1..20: mol_type = other RNA
ttcctccctgtagacacttc

SEQ ID NO: 1927 - RNA, 20 nt, synthetic construct
  misc_feature 1..20: note = spacer sequence
  source 1..20: mol_type = other RNA
tccctgtagacacttccttc

SEQ ID NO: 1928 - RNA, 20 nt, synthetic construct
  misc_feature 1..20: note = spacer sequence
  source 1..20: mol_type = other RNA
ctgtagacacttccttccat

SEQ ID NO: 1929 - RNA, 20 nt, synthetic construct
  misc_feature 1..20: note = spacer sequence
  source 1..20: mol_type = other RNA
acagggaggaaagaggggtc

SEQ ID NO: 1930 - RNA, 20 nt, synthetic construct
  misc_feature 1..20: note = spacer sequence
  source 1..20: mol_type = other RNA
ttccatctaaaccgccacgg

SEQ ID NO: 1931 - RNA, 20 nt, synthetic construct
  misc_feature 1..20: note = spacer sequence
  source 1..20: mol_type = other RNA
atctaaaccgccacggcagc

SEQ ID NO: 1932 - RNA, 20 nt, synthetic construct
  misc_feature 1..20: note = spacer sequence
  source 1..20: mol_type = other RNA
aaaccgccacggcagcctcc

SEQ ID NO: 1933 - RNA, 20 nt, synthetic construct
  misc_feature 1..20: note = spacer sequence
  source 1..20: mol_type = other RNA
ttcagcacacagataacatc

SEQ ID NO: 1934 - RNA, 20 nt, synthetic construct
  misc_feature 1..20: note = spacer sequence
  source 1..20: mol_type = other RNA
gcacacagataacatcctcc

SEQ ID NO: 1935 - RNA, 20 nt, synthetic construct
  misc_feature 1..20: note = spacer sequence
  source 1..20: mol_type = other RNA
gtgtgctgaaggaggctgcc

SEQ ID NO: 1936 - RNA, 20 nt, synthetic construct
  misc_feature 1..20: note = spacer sequence
  source 1..20: mol_type = other RNA
tcctcactgagtgggcagga

SEQ ID NO: 1937 - RNA, 20 nt, synthetic construct
  misc_feature 1..20: note = spacer sequence
  source 1..20: mol_type = other RNA
tcactgagtgggcaggaaag

SEQ ID NO: 1938 - RNA, 20 nt, synthetic construct
  misc_feature 1..20: note = spacer sequence
  source 1..20: mol_type = other RNA
ctgagtgggcaggaaaggag

SEQ ID NO: 1939 - RNA, 20 nt, synthetic construct
  misc_feature 1..20: note = spacer sequence
  source 1..20: mol_type = other RNA
gtgaggaggatgttatctgt

SEQ ID NO: 1940 - RNA, 20 nt, synthetic construct
  misc_feature 1..20: note = spacer sequence
  source 1..20: mol_type = other RNA
tgcccactcagtgaggagga

SEQ ID NO: 1941 - RNA, 20 nt, synthetic construct
  misc_feature 1..20: note = spacer sequence
  source 1..20: mol_type = other RNA
tttcctgcccactcagtgag

SEQ ID NO: 1942 - RNA, 20 nt, synthetic construct
  misc_feature 1..20: note = spacer sequence
  source 1..20: mol_type = other RNA
aagaatgaagtggtttaccc

SEQ ID NO: 1943 - RNA, 20 nt, synthetic construct
  misc_feature 1..20: note = spacer sequence
  source 1..20: mol_type = other RNA
ttgaacctcctttcctgccc

SEQ ID NO: 1944 - RNA, 20 nt, synthetic construct
  misc_feature 1..20: note = spacer sequence
  source 1..20: mol_type = other RNA
ttctttgaacctcctttcct

SEQ ID NO: 1945 - RNA, 20 nt, synthetic construct
  misc_feature 1..20: note = spacer sequence
  source 1..20: mol_type = other RNA
atttactggctgggtaaacc

SEQ ID NO: 1946 - RNA, 20 nt, synthetic construct
  misc_feature 1..20: note = spacer sequence
  source 1..20: mol_type = other RNA
ccatttactggctgggtaaa

SEQ ID NO: 1947 - RNA, 20 nt, synthetic construct
  misc_feature 1..20: note = spacer sequence
  source 1..20: mol_type = other RNA
aagactagagaccatctgtt

SEQ ID NO: 1948 - RNA, 20 nt, synthetic construct
  misc_feature 1..20: note = spacer sequence
  source 1..20: mol_type = other RNA
tggattctccatttactggc

SEQ ID NO: 1949 - RNA, 20 nt, synthetic construct
  misc_feature 1..20: note = spacer sequence
  source 1..20: mol_type = other RNA
agtcttggattctccattta

SEQ ID NO: 1950 - RNA, 20 nt, synthetic construct
  misc_feature 1..20: note = spacer sequence
  source 1..20: mol_type = other RNA
ctagtcttggattctccatt

SEQ ID NO: 1951 - RNA, 20 nt, synthetic construct
  misc_feature 1..20: note = spacer sequence
  source 1..20: mol_type = other RNA
gttcatttttgtttgtttgc

SEQ ID NO: 1952 - RNA, 20 nt, synthetic construct
  misc_feature 1..20: note = spacer sequence
  source 1..20: mol_type = other RNA
tttttgtttgtttgcatttt

SEQ ID NO: 1953 - RNA, 20 nt, synthetic construct
  misc_feature 1..20: note = spacer sequence
  source 1..20: mol_type = other RNA
tttcttttctttattctttc

SEQ ID NO: 1954 - RNA, 20 nt, synthetic construct
  misc_feature 1..20: note = spacer sequence
  source 1..20: mol_type = other RNA
tttctttattctttctttct

SEQ ID NO: 1955 - RNA, 20 nt, synthetic construct
  misc_feature 1..20: note = spacer sequence
  source 1..20: mol_type = other RNA
ttattctttctttctttttc

SEQ ID NO: 1956 - RNA, 20 nt, synthetic construct
  misc_feature 1..20: note = spacer sequence
  source 1..20: mol_type = other RNA
ttctttctttttcatttcct

SEQ ID NO: 1957 - RNA, 20 nt, synthetic construct
  misc_feature 1..20: note = spacer sequence
  source 1..20: mol_type = other RNA
ttctttttcatttcctttct

SEQ ID NO: 1958 - RNA, 20 nt, synthetic construct
  misc_feature 1..20: note = spacer sequence
  source 1..20: mol_type = other RNA
ttttcatttcctttcttcct

SEQ ID NO: 1959 - RNA, 20 nt, synthetic construct
  misc_feature 1..20: note = spacer sequence
  source 1..20: mol_type = other RNA
tttcctttcttccttccttt

SEQ ID NO: 1960 - RNA, 20 nt, synthetic construct
  misc_feature 1..20: note = spacer sequence
  source 1..20: mol_type = other RNA
tttcttccttccttttcttc

SEQ ID NO: 1961 - RNA, 20 nt, synthetic construct
  misc_feature 1..20: note = spacer sequence
  source 1..20: mol_type = other RNA
tccttccttttcttccttcc

SEQ ID NO: 1962 - RNA, 20 nt, synthetic construct
  misc_feature 1..20: note = spacer sequence
  source 1..20: mol_type = other RNA
ttccttttcttccttcctct

SEQ ID NO: 1963 - RNA, 20 nt, synthetic construct
  misc_feature 1..20: note = spacer sequence
  source 1..20: mol_type = other RNA
ttttcttccttcctctttct

SEQ ID NO: 1964 - RNA, 20 nt, synthetic construct
  misc_feature 1..20: note = spacer sequence
  source 1..20: mol_type = other RNA
tccttcctctttcttttttt

SEQ ID NO: 1965 - RNA, 20 nt, synthetic construct
  misc_feature 1..20: note = spacer sequence
  source 1..20: mol_type = other RNA
ttcctctttctttttttctt

SEQ ID NO: 1966 - RNA, 20 nt, synthetic construct
  misc_feature 1..20: note = spacer sequence
  source 1..20: mol_type = other RNA
tctttctttttttctttctt

SEQ ID NO: 1967 - RNA, 20 nt, synthetic construct
  misc_feature 1..20: note = spacer sequence
  source 1..20: mol_type = other RNA
ttctttttttctttcttctt

SEQ ID NO: 1968 - RNA, 20 nt, synthetic construct
  misc_feature 1..20: note = spacer sequence
  source 1..20: mol_type = other RNA
ttttttctttcttctttctc

SEQ ID NO: 1969 - RNA, 20 nt, synthetic construct
  misc_feature 1..20: note = spacer sequence
  source 1..20: mol_type = other RNA
ttcttctttctcttctttct

SEQ ID NO: 1970 - RNA, 20 nt, synthetic construct
  misc_feature 1..20: note = spacer sequence
  source 1..20: mol_type = other RNA
tctttctcttctttctcttt

SEQ ID NO: 1971 - RNA, 20 nt, synthetic construct
  misc_feature 1..20: note = spacer sequence
  source 1..20: mol_type = other RNA
ttctcttctttctctttctt

SEQ ID NO: 1972 - RNA, 20 nt, synthetic construct
  misc_feature 1..20: note = spacer sequence
  source 1..20: mol_type = other RNA
cttctttctctttcttttct

SEQ ID NO: 1973 - RNA, 20 nt, synthetic construct
  misc_feature 1..20: note = spacer sequence
  source 1..20: mol_type = other RNA
tctttctctttcttttcttg

SEQ ID NO: 1974 - RNA, 20 nt, synthetic construct
  misc_feature 1..20: note = spacer sequence
  source 1..20: mol_type = other RNA
ttctctttcttttcttgctc

SEQ ID NO: 1975 - RNA, 20 nt, synthetic construct
  misc_feature 1..20: note = spacer sequence
  source 1..20: mol_type = other RNA
ctttcttttcttgctctctt

SEQ ID NO: 1976 - RNA, 20 nt, synthetic construct
  misc_feature 1..20: note = spacer sequence
  source 1..20: mol_type = other RNA
ttcttttcttgctctctttc

SEQ ID NO: 1977 - RNA, 20 nt, synthetic construct
  misc_feature 1..20: note = spacer sequence
  source 1..20: mol_type = other RNA
tttcttgctctctttcttct

SEQ ID NO: 1978 - RNA, 20 nt, synthetic construct
  misc_feature 1..20: note = spacer sequence
  source 1..20: mol_type = other RNA
tgctctctttcttctttctt

SEQ ID NO: 1979 - RNA, 20 nt, synthetic construct
  misc_feature 1..20: note = spacer sequence
  source 1..20: mol_type = other RNA
ctttcttctttcttgttgtt

SEQ ID NO: 1980 - RNA, 20 nt, synthetic construct
  misc_feature 1..20: note = spacer sequence
  source 1..20: mol_type = other RNA
ttcttctttcttgttgttgt

SEQ ID NO: 1981 - RNA, 20 nt, synthetic construct
  misc_feature 1..20: note = spacer sequence
  source 1..20: mol_type = other RNA
tctttcttgttgttgttttt

SEQ ID NO: 1982 - RNA, 20 nt, synthetic construct
  misc_feature 1..20: note = spacer sequence
  source 1..20: mol_type = other RNA
ttcttgttgttgtttttgtt

SEQ ID NO: 1983 - RNA, 20 nt, synthetic construct
  misc_feature 1..20: note = spacer sequence
  source 1..20: mol_type = other RNA
tgttgttgtttttgttgaga

SEQ ID NO: 1984 - RNA, 20 nt, synthetic construct
  misc_feature 1..20: note = spacer sequence
  source 1..20: mol_type = other RNA
acaaaaacaacaacaagaaa

SEQ ID NO: 1985 - RNA, 20 nt, synthetic construct
  misc_feature 1..20: note = spacer sequence
  source 1..20: mol_type = other RNA
caacaaaaacaacaacaaga

SEQ ID NO: 1986 - RNA, 20 nt, synthetic construct
  misc_feature 1..20: note = spacer sequence
  source 1..20: mol_type = other RNA
tgtgctcagattcctagtac

SEQ ID NO: 1987 - RNA, 20 nt, synthetic construct
  misc_feature 1..20: note = spacer sequence
  source 1..20: mol_type = other RNA
gattcctagtacatgactat

SEQ ID NO: 1988 - RNA, 20 nt, synthetic construct
  misc_feature 1..20: note = spacer sequence
  source 1..20: mol_type = other RNA
gagcacatgatctcaacaaa

SEQ ID NO: 1989 - RNA, 20 nt, synthetic construct
  misc_feature 1..20: note = spacer sequence
  source 1..20: mol_type = other RNA
tagtacatgactataaagtt

SEQ ID NO: 1990 - RNA, 20 nt, synthetic construct
  misc_feature 1..20: note = spacer sequence
  source 1..20: mol_type = other RNA
tgtactaggaatctgagcac

SEQ ID NO: 1991 - RNA, 20 nt, synthetic construct
  misc_feature 1..20: note = spacer sequence
  source 1..20: mol_type = other RNA
taactttatagtcatgtact

SEQ ID NO: 1992 - RNA, 20 nt, synthetic construct
  misc_feature 1..20: note = spacer sequence
  source 1..20: mol_type = other RNA
ttcctaactttatagtcatg

SEQ ID NO: 1993 - RNA, 20 nt, synthetic construct
  misc_feature 1..20: note = spacer sequence
  source 1..20: mol_type = other RNA
tgggggctctttcctaactt

SEQ ID NO: 1994 - RNA, 20 nt, synthetic construct
  misc_feature 1..20: note = spacer sequence
  source 1..20: mol_type = other RNA
cctctgataccaatttaaag

SEQ ID NO: 1995 - RNA, 20 nt, synthetic construct
  misc_feature 1..20: note = spacer sequence
  source 1..20: mol_type = other RNA
gataccaatttaaagtttag

SEQ ID NO: 1996 - RNA, 20 nt, synthetic construct
  misc_feature 1..20: note = spacer sequence
  source 1..20: mol_type = other RNA
gaggggaaagtggtcttggg

SEQ ID NO: 1997 - RNA, 20 nt, synthetic construct
  misc_feature 1..20: note = spacer sequence
  source 1..20: mol_type = other RNA
ccacaaccaccttcaagttc

SEQ ID NO: 1998 - RNA, 20 nt, synthetic construct
  misc_feature 1..20: note = spacer sequence
  source 1..20: mol_type = other RNA
agttcaataatccacttggt

SEQ ID NO: 1999 - RNA, 20 nt, synthetic construct
  misc_feature 1..20: note = spacer sequence
  source 1..20: mol_type = other RNA
ataatccacttggtggactc

SEQ ID NO: 2000 - RNA, 20 nt, synthetic construct
  misc_feature 1..20: note = spacer sequence
  source 1..20: mol_type = other RNA
acttggtggactcgcagaac

SEQ ID NO: 2001 - RNA, 20 nt, synthetic construct
  misc_feature 1..20: note = spacer sequence
  source 1..20: mol_type = other RNA
accaagtggattattgaact

SEQ ID NO: 2002 - RNA, 20 nt, synthetic construct
  misc_feature 1..20: note = spacer sequence
  source 1..20: mol_type = other RNA
cagaacgtactgaaagctat

SEQ ID NO: 2003 - RNA, 20 nt, synthetic construct
  misc_feature 1..20: note = spacer sequence
  source 1..20: mol_type = other RNA
gcgagtccaccaagtggatt

SEQ ID NO: 2004 - RNA, 20 nt, synthetic construct
  misc_feature 1..20: note = spacer sequence
  source 1..20: mol_type = other RNA
gtacgttctgcgagtccacc

SEQ ID NO: 2005 - RNA, 20 nt, synthetic construct
  misc_feature 1..20: note = spacer sequence
  source 1..20: mol_type = other RNA
tagcaaaaggacacagatta

SEQ ID NO: 2006 - RNA, 20 nt, synthetic construct
  misc_feature 1..20: note = spacer sequence
  source 1..20: mol_type = other RNA
ttttgctatgataaactgta

SEQ ID NO: 2007 - RNA, 20 nt, synthetic construct
  misc_feature 1..20: note = spacer sequence
  source 1..20: mol_type = other RNA
gtgtccttttgctatgataa

SEQ ID NO: 2008 - RNA, 20 nt, synthetic construct
  misc_feature 1..20: note = spacer sequence
  source 1..20: mol_type = other RNA
gccaagggaagacacacata

SEQ ID NO: 2009 - RNA, 20 nt, synthetic construct
  misc_feature 1..20: note = spacer sequence
  source 1..20: mol_type = other RNA
cttggctgatgttaatctgt

SEQ ID NO: 2010 - RNA, 20 nt, synthetic construct
  misc_feature 1..20: note = spacer sequence
  source 1..20: mol_type = other RNA
tcccttggctgatgttaatc

SEQ ID NO: 2011 - RNA, 20 nt, synthetic construct
  misc_feature 1..20: note = spacer sequence
  source 1..20: mol_type = other RNA
aggagagcttccagcagtcc

SEQ ID NO: 2012 - RNA, 20 nt, synthetic construct
  misc_feature 1..20: note = spacer sequence
  source 1..20: mol_type = other RNA
tggacactgccctatgtgtg

SEQ ID NO: 2013 - RNA, 20 nt, synthetic construct
  misc_feature 1..20: note = spacer sequence
  source 1..20: mol_type = other RNA
cctggacactgccctatgtg

SEQ ID NO: 2014 - RNA, 20 nt, synthetic construct
  misc_feature 1..20: note = spacer sequence
  source 1..20: mol_type = other RNA
agcagtcctctcccagtgga

SEQ ID NO: 2015 - RNA, 20 nt, synthetic construct
  misc_feature 1..20: note = spacer sequence
  source 1..20: mol_type = other RNA
tctcccagtggagtaatgga

SEQ ID NO: 2016 - RNA, 20 nt, synthetic construct
  misc_feature 1..20: note = spacer sequence
  source 1..20: mol_type = other RNA
cccagtggagtaatggactc

SEQ ID NO: 2017 - RNA, 20 nt, synthetic construct
  misc_feature 1..20: note = spacer sequence
  source 1..20: mol_type = other RNA
cagtggagtaatggactcct

SEQ ID NO: 2018 - RNA, 20 nt, synthetic construct
  misc_feature 1..20: note = spacer sequence
  source 1..20: mol_type = other RNA
actgggagaggactgctgga

SEQ ID NO: 2019 - RNA, 20 nt, synthetic construct
  misc_feature 1..20: note = spacer sequence
  source 1..20: mol_type = other RNA
attactccactgggagagga

SEQ ID NO: 2020 - RNA, 20 nt, synthetic construct
  misc_feature 1..20: note = spacer sequence
  source 1..20: mol_type = other RNA
ttctggaaactatatgcacg

SEQ ID NO: 2021 - RNA, 20 nt, synthetic construct
  misc_feature 1..20: note = spacer sequence
  source 1..20: mol_type = other RNA
ggaaactatatgcacggact

SEQ ID NO: 2022 - RNA, 20 nt, synthetic construct
  misc_feature 1..20: note = spacer sequence
  source 1..20: mol_type = other RNA
agaaggagtccattactcca

SEQ ID NO: 2023 - RNA, 20 nt, synthetic construct
  misc_feature 1..20: note = spacer sequence
  source 1..20: mol_type = other RNA
gtgcatatagtttccagaag

SEQ ID NO: 2024 - RNA, 20 nt, synthetic construct
  misc_feature 1..20: note = spacer sequence
  source 1..20: mol_type = other RNA
atgtatatagtccgtgcata

SEQ ID NO: 2025 - RNA, 20 nt, synthetic construct
  misc_feature 1..20: note = spacer sequence
  source 1..20: mol_type = other RNA
ttggttggcaatactccatg

SEQ ID NO: 2026 - RNA, 20 nt, synthetic construct
  misc_feature 1..20: note = spacer sequence
  source 1..20: mol_type = other RNA
ccaggctgttggtgtccaga

SEQ ID NO: 2027 - RNA, 20 nt, synthetic construct
  misc_feature 1..20: note = spacer sequence
  source 1..20: mol_type = other RNA
cccaccataaatcacattgg

SEQ ID NO: 2028 - RNA, 20 nt, synthetic construct
  misc_feature 1..20: note = spacer sequence
  source 1..20: mol_type = other RNA
caccataaatcacattggtc

SEQ ID NO: 2029 - RNA, 20 nt, synthetic construct
  misc_feature 1..20: note = spacer sequence
  source 1..20: mol_type = other RNA
cattggtctaacatgttgtg

SEQ ID NO: 2030 - RNA, 20 nt, synthetic construct
  misc_feature 1..20: note = spacer sequence
  source 1..20: mol_type = other RNA
aacatgttgtgtctgtttgg

SEQ ID NO: 2031 - RNA, 20 nt, synthetic construct
  misc_feature 1..20: note = spacer sequence
  source 1..20: mol_type = other RNA
gtttggcatggcccatggcc

SEQ ID NO: 2032 - RNA, 20 nt, synthetic construct
  misc_feature 1..20: note = spacer sequence
  source 1..20: mol_type = other RNA
aggtaaacacagtgctatta

SEQ ID NO: 2033 - RNA, 20 nt, synthetic construct
  misc_feature 1..20: note = spacer sequence
  source 1..20: mol_type = other RNA
agcaggacatctaagggctt

SEQ ID NO: 2034 - RNA, 20 nt, synthetic construct
  misc_feature 1..20: note = spacer sequence
  source 1..20: mol_type = other RNA
tgcttgataatagcactgtg

SEQ ID NO: 2035 - RNA, 20 nt, synthetic construct
  misc_feature 1..20: note = spacer sequence
  source 1..20: mol_type = other RNA
aagggcttagagatcacctc

SEQ ID NO: 2036 - RNA, 20 nt, synthetic construct
  misc_feature 1..20: note = spacer sequence
  source 1..20: mol_type = other RNA
aagcccttagatgtcctgct

SEQ ID NO: 2037 - RNA, 20 nt, synthetic construct
  misc_feature 1..20: note = spacer sequence
  source 1..20: mol_type = other RNA
ctaagcccttagatgtcctg

SEQ ID NO: 2038 - RNA, 20 nt, synthetic construct
  misc_feature 1..20: note = spacer sequence
  source 1..20: mol_type = other RNA
cctcccaagagccaagggca

SEQ ID NO: 2039 - RNA, 20 nt, synthetic construct
  misc_feature 1..20: note = spacer sequence
  source 1..20: mol_type = other RNA
caagagccaagggcaaagcc

SEQ ID NO: 2040 - RNA, 20 nt, synthetic construct
  misc_feature 1..20: note = spacer sequence
  source 1..20: mol_type = other RNA
tgggaggtgatctctaagcc

SEQ ID NO: 2041 - RNA, 20 nt, synthetic construct
  misc_feature 1..20: note = spacer sequence
  source 1..20: mol_type = other RNA
gggctttgcccttggctctt

SEQ ID NO: 2042 - RNA, 20 nt, synthetic construct
  misc_feature 1..20: note = spacer sequence
  source 1..20: mol_type = other RNA
cacttcaagtaagcttaaaa

SEQ ID NO: 2043 - RNA, 20 nt, synthetic construct
  misc_feature 1..20: note = spacer sequence
  source 1..20: mol_type = other RNA
cttcaagtaagcttaaaatt

SEQ ID NO: 2044 - RNA, 20 nt, synthetic construct
  misc_feature 1..20: note = spacer sequence
  source 1..20: mol_type = other RNA
agtaagcttaaaattcttta

SEQ ID NO: 2045 - RNA, 20 nt, synthetic construct
  misc_feature 1..20: note = spacer sequence
  source 1..20: mol_type = other RNA
ttactacacaacaccctttc

SEQ ID NO: 2046 - RNA, 20 nt, synthetic construct
  misc_feature 1..20: note = spacer sequence
  source 1..20: mol_type = other RNA
ttgttacaggagagtggggg

SEQ ID NO: 2047 - RNA, 20 nt, synthetic construct
  misc_feature 1..20: note = spacer sequence
  source 1..20: mol_type = other RNA
tgtaacaaggaaagggtgtt

SEQ ID NO: 2048 - RNA, 20 nt, synthetic construct
  misc_feature 1..20: note = spacer sequence
  source 1..20: mol_type = other RNA
cctgtaacaaggaaagggtg

SEQ ID NO: 2049 - RNA, 20 nt, synthetic construct
  misc_feature 1..20: note = spacer sequence
  source 1..20: mol_type = other RNA
cagaggaagagctcataact

SEQ ID NO: 2050 - RNA, 20 nt, synthetic construct
  misc_feature 1..20: note = spacer sequence
  source 1..20: mol_type = other RNA
gtgagggccagcagggcacc

SEQ ID NO: 2051 - RNA, 20 nt, synthetic construct
  misc_feature 1..20: note = spacer sequence
  source 1..20: mol_type = other RNA
tctgtgagggccagcagggc

SEQ ID NO: 2052 - RNA, 20 nt, synthetic construct
  misc_feature 1..20: note = spacer sequence
  source 1..20: mol_type = other RNA
tcctctgtgagggccagcag

SEQ ID NO: 2053 - RNA, 20 nt, synthetic construct
  misc_feature 1..20: note = spacer sequence
  source 1..20: mol_type = other RNA
taactcataacccacaaaac

SEQ ID NO: 2054 - RNA, 20 nt, synthetic construct
  misc_feature 1..20: note = spacer sequence
  source 1..20: mol_type = other RNA
taacccacaaaactgtaatg

SEQ ID NO: 2055 - RNA, 20 nt, synthetic construct
  misc_feature 1..20: note = spacer sequence
  source 1..20: mol_type = other RNA
ttacagttttgtgggttatg

SEQ ID NO: 2056 - RNA, 20 nt, synthetic construct
  misc_feature 1..20: note = spacer sequence
  source 1..20: mol_type = other RNA
catccgactgaaaaatggga

SEQ ID NO: 2057 - RNA, 20 nt, synthetic construct
  misc_feature 1..20: note = spacer sequence
  source 1..20: mol_type = other RNA
gactgaaaaatgggactgga

SEQ ID NO: 2058 - RNA, 20 nt, synthetic construct
  misc_feature 1..20: note = spacer sequence
  source 1..20: mol_type = other RNA
gatgggattgcccttcatta

SEQ ID NO: 2059 - RNA, 20 nt, synthetic construct
  misc_feature 1..20: note = spacer sequence
  source 1..20: mol_type = other RNA
gtcggatgggattgcccttc

SEQ ID NO: 2060 - RNA, 20 nt, synthetic construct
  misc_feature 1..20: note = spacer sequence
  source 1..20: mol_type = other RNA
catttttcagtcggatggga

SEQ ID NO: 2061 - RNA, 20 nt, synthetic construct
  misc_feature 1..20: note = spacer sequence
  source 1..20: mol_type = other RNA
agtcccatttttcagtcgga

SEQ ID NO: 2062 - RNA, 20 nt, synthetic construct
  misc_feature 1..20: note = spacer sequence
  source 1..20: mol_type = other RNA
gtgcctgtttccagtcccat

SEQ ID NO: 2063 - RNA, 20 nt, synthetic construct
  misc_feature 1..20: note = spacer sequence
  source 1..20: mol_type = other RNA
agaaggaaagagaggggcac

SEQ ID NO: 2064 - RNA, 20 nt, synthetic construct
  misc_feature 1..20: note = spacer sequence
  source 1..20: mol_type = other RNA
ggaatgttcagtgcctgttt

SEQ ID NO: 2065 - RNA, 20 nt, synthetic construct
  misc_feature 1..20: note = spacer sequence
  source 1..20: mol_type = other RNA
ttctggaatgttcagtgcct

SEQ ID NO: 2066 - RNA, 20 nt, synthetic construct
  misc_feature 1..20: note = spacer sequence
  source 1..20: mol_type = other RNA
ttccttctggaatgttcagt

SEQ ID NO: 2067 - RNA, 20 nt, synthetic construct
  misc_feature 1..20: note = spacer sequence
  source 1..20: mol_type = other RNA
ctttccttctggaatgttca

SEQ ID NO: 2068 - RNA, 20 nt, synthetic construct
  misc_feature 1..20: note = spacer sequence
  source 1..20: mol_type = other RNA
cctgtgcccctctctttcct

SEQ ID NO: 2069 - RNA, 20 nt, synthetic construct
  misc_feature 1..20: note = spacer sequence
  source 1..20: mol_type = other RNA
acttacgcgctcccctgtgc

SEQ ID NO: 2070 - RNA, 20 nt, synthetic construct
  misc_feature 1..20: note = spacer sequence
  source 1..20: mol_type = other RNA
ttaaatccacttacgcgctc

SEQ ID NO: 2071 - RNA, 20 nt, synthetic construct
  misc_feature 1..20: note = spacer sequence
  source 1..20: mol_type = other RNA
acaagaaaaagtgcaatcga

SEQ ID NO: 2072 - RNA, 20 nt, synthetic construct
  misc_feature 1..20: note = spacer sequence
  source 1..20: mol_type = other RNA
tgtagactagccatcattaa

SEQ ID NO: 2073 - RNA, 20 nt, synthetic construct
  misc_feature 1..20: note = spacer sequence
  source 1..20: mol_type = other RNA
attcaggttattgaaaattc

SEQ ID NO: 2074 - RNA, 20 nt, synthetic construct
  misc_feature 1..20: note = spacer sequence
  source 1..20: mol_type = other RNA
attgcactttttcttgtaga

SEQ ID NO: 2075 - RNA, 20 nt, synthetic construct
  misc_feature 1..20: note = spacer sequence
  source 1..20: mol_type = other RNA
ggttattgaaaattcacccc

SEQ ID NO: 2076 - RNA, 20 nt, synthetic construct
  misc_feature 1..20: note = spacer sequence
  source 1..20: mol_type = other RNA
ataacctgaatcgattgcac

SEQ ID NO: 2077 - RNA, 20 nt, synthetic construct
  misc_feature 1..20: note = spacer sequence
  source 1..20: mol_type = other RNA
cccccaatattttcctctac

SEQ ID NO: 2078 - RNA, 20 nt, synthetic construct
  misc_feature 1..20: note = spacer sequence
  source 1..20: mol_type = other RNA
tctactcatcaaacgtggaa

SEQ ID NO: 2079 - RNA, 20 nt, synthetic construct
  misc_feature 1..20: note = spacer sequence
  source 1..20: mol_type = other RNA
actcatcaaacgtggaagaa

SEQ ID NO: 2080 - RNA, 20 nt, synthetic construct
  misc_feature 1..20: note = spacer sequence
  source 1..20: mol_type = other RNA
tcaaacgtggaagaaagggg

SEQ ID NO: 2081 - RNA, 20 nt, synthetic construct
  misc_feature 1..20: note = spacer sequence
  source 1..20: mol_type = other RNA
aacgtggaagaaaggggctc

SEQ ID NO: 2082 - RNA, 20 nt, synthetic construct
  misc_feature 1..20: note = spacer sequence
  source 1..20: mol_type = other RNA
acgtttgatgagtagaggaa

SEQ ID NO: 2083 - RNA, 20 nt, synthetic construct
  misc_feature 1..20: note = spacer sequence
  source 1..20: mol_type = other RNA
tccacgtttgatgagtagag

SEQ ID NO: 2084 - RNA, 20 nt, synthetic construct
  misc_feature 1..20: note = spacer sequence
  source 1..20: mol_type = other RNA
ttggagcttgctcatggctc

SEQ ID NO: 2085 - RNA, 20 nt, synthetic construct
  misc_feature 1..20: note = spacer sequence
  source 1..20: mol_type = other RNA
aatgagcccctttcttccac

SEQ ID NO: 2086 - RNA, 20 nt, synthetic construct
  misc_feature 1..20: note = spacer sequence
  source 1..20: mol_type = other RNA
tggctcgcatcagggccagc

SEQ ID NO: 2087 - RNA, 20 nt, synthetic construct
  misc_feature 1..20: note = spacer sequence
  source 1..20: mol_type = other RNA
catcagggccagccggcctg

SEQ ID NO: 2088 - RNA, 20 nt, synthetic construct
  misc_feature 1..20: note = spacer sequence
  source 1..20: mol_type = other RNA
gggccagccggcctgtcttg

SEQ ID NO: 2089 - RNA, 20 nt, synthetic construct
  misc_feature 1..20: note = spacer sequence
  source 1..20: mol_type = other RNA
tgttctctgattataacatc

SEQ ID NO: 2090 - RNA, 20 nt, synthetic construct
  misc_feature 1..20: note = spacer sequence
  source 1..20: mol_type = other RNA
ctgattataacatcaaggac

SEQ ID NO: 2091 - RNA, 20 nt, synthetic construct
  misc_feature 1..20: note = spacer sequence
  source 1..20: mol_type = other RNA
gattataacatcaaggaccc

SEQ ID NO: 2092 - RNA, 20 nt, synthetic construct
  misc_feature 1..20: note = spacer sequence
  source 1..20: mol_type = other RNA
gagaacaagacaggccggct

SEQ ID NO: 2093 - RNA, 20 nt, synthetic construct
  misc_feature 1..20: note = spacer sequence
  source 1..20: mol_type = other RNA
aggacccctaggtggtgctg

SEQ ID NO: 2094 - RNA, 20 nt, synthetic construct
  misc_feature 1..20: note = spacer sequence
  source 1..20: mol_type = other RNA
ttgatgttataatcagagaa

SEQ ID NO: 2095 - RNA, 20 nt, synthetic construct
  misc_feature 1..20: note = spacer sequence
  source 1..20: mol_type = other RNA
gcaccacctaggggtccttg

SEQ ID NO: 2096 - RNA, 20 nt, synthetic construct
  misc_feature 1..20: note = spacer sequence
  source 1..20: mol_type = other RNA
agcttgggtggcaaatagtt

SEQ ID NO: 2097 - RNA, 20 nt, synthetic construct
  misc_feature 1..20: note = spacer sequence
  source 1..20: mol_type = other RNA
ttttttgttgttgttaacta

SEQ ID NO: 2098 - RNA, 20 nt, synthetic construct
  misc_feature 1..20: note = spacer sequence
  source 1..20: mol_type = other RNA
gaaagttcagcaaacctctt

SEQ ID NO: 2099 - RNA, 20 nt, synthetic construct
  misc_feature 1..20: note = spacer sequence
  source 1..20: mol_type = other RNA
gattccttttttgttgttgt

SEQ ID NO: 2100 - RNA, 20 nt, synthetic construct
  misc_feature 1..20: note = spacer sequence
  source 1..20: mol_type = other RNA
gcaaacctcttctttttttt

SEQ ID NO: 2101 - RNA, 108 nt, synthetic construct
  misc_feature 1..108: note = gNA Variant Scaffold
  source 1..108: mol_type = other RNA
tactggcgcttttatctcattactttgagagccatcaccagcgactatgtcgtatgggtaaagcgcaggtgggacgacctctcggtcgtcctatctgaagcatcaaag

SEQ ID NO: 2102 - RNA, 99 nt, synthetic construct
  misc_feature 1..99: note = gNA Variant Scaffold
  source 1..99: mol_type = other RNA
tactggcgcttttatctcattactttgagagccatcaccagcgactatgtcgtatgggtaaagcgctgctcgacgcgtcctcgagcagaagcatcaaag

SEQ ID NO: 2103 - RNA, 97 nt, synthetic construct
  misc_feature 1..97: note = gNA Variant Scaffold
  source 1..97: mol_type = other RNA
tactggcgcttttatctcattactttgagagccatcaccagcgactatgtcgtatgggtaaagcgctgctcgctccgttcgagcagaagcatcaaag

SEQ ID NO: 2104 - RNA, 91 nt, synthetic construct
  misc_feature 1..91: note = gNA Variant Scaffold
  source 1..91: mol_type = other RNA
gtactggcgcttttatctcattactttgagagccatcaccagcgactatgtcgtatgggtaaagcgccctcttcggagggaagcatcaaag

SEQ ID NO: 2105 - RNA, 99 nt, synthetic construct
  misc_feature 1..99: note = gNA Variant Scaffold
  source 1..99: mol_type = other RNA
tactggcgcttttatctcattactttgagagccatcaccagcgactatgtcgtatgggtaaagcgcaggagtttctatggaaaccctgaagcatcaaag

SEQ ID NO: 2106 - RNA, 99 nt, synthetic construct
  misc_feature 1..99: note = gNA Variant Scaffold
  source 1..99: mol_type = other RNA
gtactggcgcctttatctcattactttgagagccatcaccagcgactatgtcgtatgggtaaagcgcttacggacttcggtccgtaagaagcatcaaag

SEQ ID NO: 2107 - RNA, 90 nt, synthetic construct
  misc_feature 1..90: note = gNA Variant Scaffold
  source 1..90: mol_type = other RNA
tactggcgcttttatctcattactttgagagccatcaccagcgactatgtcgtatgggtaaagcgctgcgcttgcgcagaagcatcaaag

SEQ ID NO: 2108 - RNA, 108 nt, synthetic construct
  misc_feature 1..108: note = gNA Variant Scaffold
  source 1..108: mol_type = other RNA
tactggcgcttttatctgattactttgagagccatcaccagcgactatgtcgtatgggtaaagcgcttatttatcggagagaaatccgataaataagaagcatcaaag

SEQ ID NO: 2109 - RNA, 108 nt, synthetic construct
  misc_feature 1..108: note = gNA Variant Scaffold
  source 1..108: mol_type = other RNA
tactggcgcttttatcgcattactttgagagccatcaccagcgactatgtcgtatgggtaaagcgcttatttatcggagagaaatccgataaataagaagcatcaaag

SEQ ID NO: 2110 - RNA, 110 nt, synthetic construct
  misc_feature 1..110: note = gNA Variant Scaffold
  source 1..110: mol_type = other RNA
tactggcgcttttatctcattactttgagagccatcaccagcgactatgtcgtatgggtaaagcgcttatttatcggagacttcggtccgataaataagaagcatcaaag

SEQ ID NO: 2111 - RNA, 97 nt, synthetic construct
  misc_feature 1..97: note = gNA Variant Scaffold
  source 1..97: mol_type = other RNA
tactggcgcttttatctcattactttgagagccatcaccagcgactatgtcgtatgggtaaagcgcacatgaggattacccatgtgaagcatcaaag

SEQ ID NO: 2112 - RNA, 106 nt, synthetic construct
  misc_feature 1..106: note = gNA Variant Scaffold
  source 1..106: mol_type = other RNA
gctggcgcttttatctcattactttgagagccatcaccagcgactatgtcgtatgggtaaagcgcttatttatcgtgagaaatccgataaataagaagcatcaaag

SEQ ID NO: 2113 - RNA, 96 nt, synthetic construct
  misc_feature 1..96: note = gNA Variant Scaffold
  source 1..96: mol_type = other RNA
tactggcgcttttatctcattactttgagagccatcaccagcgactatgtcgtatgggtaaagcgctgcatgtctaagacagcagaagcatcaaag

SEQ ID NO: 2114 - RNA, 90 nt, synthetic construct
  misc_feature 1..90: note = gNA Variant Scaffold
  source 1..90: mol_type = other RNA
tactggcgcttttatctcattactttgagagccatcaccagcgactatgtcgtatgggtaaagcgcagggcttcggccgaagcatcaaag

SEQ ID NO: 2115 - RNA, 98 nt, synthetic construct
  misc_feature 1..98: note = gNA Variant Scaffold
  source 1..98: mol_type = other RNA
tactggcgcttttatctcattactttgagagccatcaccagcgactatgtcgtatgggtaaagcgcaatccattgcactccggattgaagcatcaaag

SEQ ID NO: 2116 - RNA, 108 nt, synthetic construct
  misc_feature 1..108: note = gNA Variant Scaffold
  source 1..108: mol_type = other RNA
tactggcgcttttctcgcattactttgagagccatcaccagcgactatgtcgtatgggtaaagcgcttatttatcggagagaaatccgataaataagaagcatcaaag

SEQ ID NO: 2117 - RNA, 108 nt, synthetic construct
  misc_feature 1..108: note = gNA Variant Scaffold
  source 1..108: mol_type = other RNA
tactggcgcttttatctcattactttgagagccatcaccagcgactatgtcgtatgggtaaagcgcttatttatcggacttcggtccgataaataagaagcatcaaag

SEQ ID NO: 2118 - RNA, 100 nt, synthetic construct
  misc_feature 1..100: note = gNA Variant Scaffold
  source 1..100: mol_type = other RNA
tactggcgcttttatctcattactttgagagccatcaccagcgactatgtcgtatgggtaaagcgctgctcgtttgcggctacgagcagaagcatcaaag

SEQ ID NO: 2119 - RNA, 100 nt, synthetic construct
  misc_feature 1..100: note = gNA Variant Scaffold
  source 1..100: mol_type = other RNA
tactggcgcttttatctcattactttgagagccatcaccagcgactatgtcgtatgggtaaagcgcttatttatcgagagataaataagaagcatcaaag

SEQ ID NO: 2120 - RNA, 107 nt, synthetic construct
  misc_feature 1..107: note = gNA Variant Scaffold
  source 1..107: mol_type = other RNA
tacggcgcttttatctcattactttgagagccatcaccagcgactatgtcgtatgggtaaagcgcttatttatcggagagaaatccgataaataagaagcatcaaag

SEQ ID NO: 2121 - RNA, 99 nt, synthetic construct
  misc_feature 1..99: note = gNA Variant Scaffold
  source 1..99: mol_type = other RNA
tactggcgccttttatctcattactttgagagccatcaccagcgactatgtcgtatgggtaaagcgcttacggacttcggtccgtaagaagcatcaaag

SEQ ID NO: 2122 - RNA, 108 nt, synthetic construct
  misc_feature 1..108: note = gNA Variant Scaffold
  source 1..108: mol_type = other RNA
tactggcgcttttatctcattactttgagagccatcaccagcgactatgtcgtatcggtaaagcgcttatttatcggagagaaatccgataaataagaagcatcaaag

SEQ ID NO: 2123 - RNA, 108 nt, synthetic construct
  misc_feature 1..108: note = gNA Variant Scaffold
  source 1..108: mol_type = other RNA
tactggcgcctttatctcattactttgagagccatcaccagcgactatgtcgtatgggtaaagcgcttatttatcggacttcggtccgataaataagaagcatcaaag

SEQ ID NO: 2124 - RNA, 105 nt, synthetic construct
  misc_feature 1..105: note = gNA Variant Scaffold
  source 1..105: mol_type = other RNA
tactggcgcttttatctcattactttgagagccatcaccagcgactatgtcgtatgggtaaagcgcttatttatcgagaaatccgataaataagaagcatcaaag

SEQ ID NO: 2125 - RNA, 103 nt, synthetic construct
  misc_feature 1..103: note = gNA Variant Scaffold
  source 1..103: mol_type = other RNA
gcgcttttatctcattactttgagagccatcaccagcgactatgtcgtatgggtaaagcgcttatttatcggagagaaatccgataaataagaagcatcaaag

SEQ ID NO: 2126 - RNA, 103 nt, synthetic construct
  misc_feature 1..103: note = gNA Variant Scaffold
  source 1..103: mol_type = other RNA
tactggcgcttttatctcattactttgagagccatcaccagcgactatgtcgtatgggtaaagcgcttatttatcggagagagataaataagaagcatcaaag

SEQ ID NO: 2127 - RNA, 108 nt, synthetic construct
  misc_feature 1..108: note = gNA Variant Scaffold
  source 1..108: mol_type = other RNA
tactggcgcttttatctcattactttggagagccatcaccagcgactatgtcgtatgggtaaagcgcttatttatcggagagtatccgataaataagaagcatcaaag

SEQ ID NO: 2128 - RNA, 109 nt, synthetic construct
  misc_feature 1..109: note = gNA Variant Scaffold
  source 1..109: mol_type = other RNA
tactggcgcttttatctcattactttgagagccatcaccagcgactatgttcgtatgggtaaagcgcttatttatcggagagaaatccgataaataagaagcatcaaag

SEQ ID NO: 2129 - RNA, 105 nt, synthetic construct
  misc_feature 1..105: note = gNA Variant Scaffold
  source 1..105: mol_type = other RNA
agcgcttttatctcattactttgagagccatcaccagcgactatgtcgtatgggtaaagcgcttatttatcggagagaaatgccgataaataagaagcatcaaag

SEQ ID NO: 2130 - RNA, 109 nt, synthetic construct
  misc_feature 1..109: note = gNA Variant Scaffold
  source 1..109: mol_type = other RNA
tactggcgcttttatctcattactttgagagccatcaccagcgactatgtcgtatgggtaaagcgcttatttatcggagagaaatccgataaaataagaagcatcaaag

SEQ ID NO: 2131 - RNA, 109 nt, synthetic construct
  misc_feature 1..109: note = gNA Variant Scaffold
  source 1..109: mol_type = other RNA
tactggcgcttttatctcattactttgagagccatcaccagcgactatgtcgtatgggtaaagcgcttattgtatcggagagaaatccgataaataagaagcatcaaag

SEQ ID NO: 2132 - RNA, 102 nt, synthetic construct
  misc_feature 1..102: note = gNA Variant Scaffold
  source 1..102: mol_type = other RNA
gcgcttttatctcattactttgagagccatcaccagcgactatgtcgtatgggtaaagcgcttatttatcggacttcggtccgataaataagcgcatcaaag

SEQ ID NO: 2133 - RNA, 108 nt, synthetic construct
  misc_feature 1..108: note = gNA Variant Scaffold
  source 1..108: mol_type = other RNA
tactggcgcttttctctcattactttgagagccatcaccagcgactatgtcgtatgggtaaagcgcttatttatcggagagaaatccgataaataagaagcatcaaag

SEQ ID NO: 2134 - RNA, 106 nt, synthetic construct
  misc_feature 1..106: note = gNA Variant Scaffold
  source 1..106: mol_type = other RNA
gtggcgcttttatctcattactttgagagccatcaccagcgactatgtcgtatgggtaaagcgcttatttatcggagagaaatccgataaataagaagcatcaaag

SEQ ID NO: 2135 - RNA, 110 nt, synthetic construct
  misc_feature 1..110: note = gNA Variant Scaffold
  source 1..110: mol_type = other RNA
tactggcgcttttatctcattactttgagagccatcaccagcgaccttatgtcgtatgggtaaagcgcttatttatcggagagaaatccgataaataagaagcatcaaag

SEQ ID NO: 2136 - RNA, 107 nt, synthetic construct
  misc_feature 1..107: note = gNA Variant Scaffold
  source 1..107: mol_type = other RNA
gatggcgcttttatctcattactttgagagccatcaccagcgactatgtcgtatgggtaaagcgcttatttatcggacttcggtccgataaataagaagcatcaaag

SEQ ID NO: 2137 - RNA, 106 nt, synthetic construct
  misc_feature 1..106: note = gNA Variant Scaffold
  source 1..106: mol_type = other RNA
tactggcgcttttatctcattactttgagagccatcaccagcgactatgtcgtatgggtaaagcgcttatttatcggagagaaatccgataaaagaagcatcaaag

SEQ ID NO: 2138 - RNA, 109 nt, synthetic construct
  misc_feature 1..109: note = gNA Variant Scaffold
  source 1..109: mol_type = other RNA
tactggcgcttttatctcattactttgagagccatcaccagcgatctatgtcgtatgggtaaagcgcttatttatcggagagaaatccgataaataagaagcatcaaag

SEQ ID NO: 2139 - RNA, 106 nt, synthetic construct
  misc_feature 1..106: note = gNA Variant Scaffold
  source 1..106: mol_type = other RNA
tactggcgcttttatctcattactttgagagccatcaccagcgactatgtcgtatgggtaaaggcttatttatcggagagaaatccgataaaaagaagcatcaaag

SEQ ID NO: 2140 - RNA, 107 nt, synthetic construct
  misc_feature 1..107: note = gNA Variant Scaffold
  source 1..107: mol_type = other RNA
tactggcgcttttatctcattactttgagagccatcaccagcgactatgtcgtatgggtaaagcgcttatttatcggagagaaatccgataaaaagaagcatcaaag

SEQ ID NO: 2141 - RNA, 107 nt, synthetic construct
  misc_feature 1..107: note = gNA Variant Scaffold
  source 1..107: mol_type = other RNA
tactggcgctttatctcattactttgagagccatcaccagcgactatgtcgtatgggtaaagcgcttatttatcggacttcggtccgataaataagaagcatcaaag

SEQ ID NO: 2142 - RNA, 98 nt, synthetic construct
  misc_feature 1..98: note = gNA Variant Scaffold
  source 1..98: mol_type = other RNA
cggcgcttttctcgcattactttgagagccatcaccagcgactatgtcgtatgggtaaagcgcttattgtatcgagagataaataagaagcatcaaag

SEQ ID NO: 2143 - RNA, 107 nt, synthetic construct
  misc_feature 1..107: note = gNA Variant Scaffold
  source 1..107: mol_type = other RNA
cactggcgcttttatctcattactttgagagccatcaccagcgactatgtcgtatgggtaaagcgcttattttcggagagaaatccgataaataagaagcatcaaag

SEQ ID NO: 2144 - RNA, 106 nt, synthetic construct
  misc_feature 1..106: note = gNA Variant Scaffold
  source 1..106: mol_type = other RNA
tactggcgctttatctcattactttgagagccatcaccagcgacttcggtcgtatgggtaaagcgcttatgtatcggcttcggccgatacataagaagcatcaaag

SEQ ID NO: 2145 - RNA, 107 nt, synthetic construct
  misc_feature 1..107: note = gNA Variant Scaffold
  source 1..107: mol_type = other RNA
tactggcgcttttatctcattactttgagagccatcaccagcgacttcggtcgtatgggtaaagcgcttatgtatcggcttcggccgatacataagaagcatcaaag

SEQ ID NO: 2146 - RNA, 109 nt, synthetic construct
  misc_feature 1..109: note = gNA Variant Scaffold
  source 1..109: mol_type = other RNA
tactggcgcttttatctcattactttgagagccatcaccagcgactatgtcgtatgggtgaaagcgcttatttatcggagagaaatccgataaataagaagcatcaaag

SEQ ID NO: 2147 - RNA, 64 nt, synthetic construct
  misc_feature 1..64: note = gNA Variant Scaffold
  source 1..64: mol_type = other RNA
tactggcgcttttatctcattactttgagagccatcaccagcgacttcggtcgtatgggtaaag

SEQ ID NO: 2148 - RNA, 62 nt, synthetic construct
  misc_feature 1..62: note = gNA Variant Scaffold
  source 1..62: mol_type = other RNA
gatgggcttttatctcattactttgagagccatcaccagcgacttcggtcgtatgggtaaag

SEQ ID NO: 2149 - RNA, 105 nt, synthetic construct
  misc_feature 1..105: note = gNA Variant Scaffold
  source 1..105: mol_type = other RNA
gatgggcttttatctcattactttgagagccatcaccagcgacttcggtcgtatgggtaaagcgcttatttatcggcttcggccgataaataagaagcatcaaag

SEQ ID NO: 2150 - RNA, 156 nt, synthetic construct
  misc_feature 1..156: note = gNA Variant Scaffold
  source 1..156: mol_type = other RNA
tactggcgcttttatctcattactttgagagccatcaccagcgactatgtcgtatgggtaaagcgctacactgggatcgctgaattagagatcggcgtcctttcattctatatactttggagttttaaaatgtctctaagtacagaagcatcaaag

SEQ ID NO: 2151 - RNA, 103 nt, synthetic construct
  misc_feature 1..103: note = gNA Variant Scaffold
  source 1..103: mol_type = other RNA
ggcgcttttatctcattactttgagagccatcaccagcgacttcggtcgtatgggtaaagcgcttatttatcggcttcggccgataaataagaagcatcaaag

SEQ ID NO: 2152 - RNA, 106 nt, synthetic construct
  misc_feature 1..106: note = gNA Variant Scaffold
  source 1..106: mol_type = other RNA
gctggcgcttttatctcattactttgagagccatcaccagcgacttcggtcgtatgggtaaagcgcttatttatcggcttcggccgataaataagaagcatcaaag

SEQ ID NO: 2153 - RNA, 109 nt, synthetic construct
  misc_feature 1..109: note = gNA Variant Scaffold
  source 1..109: mol_type = other RNA
tactggcgcttttatctcattactttgagagccatcaccagcgacttcggtcgtatgggtaaagcgcttatttatcggagagaaatccgataaataagaagcatcaaag

SEQ ID NO: 2154 - RNA, 112 nt, synthetic construct
  misc_feature 1..112: note = gNA Variant Scaffold
  source 1..112: mol_type = other RNA
tactggcgcttttatctcattactttgagagccatgctccaccagcgactatgtcgtatgggtaaagcgcttatttatcggagagaaatccgataaataagaagcatcaaag

SEQ ID NO: 2155 - RNA, 97 nt, synthetic construct
  misc_feature 1..97: note = gNA Variant Scaffold
  source 1..97: mol_type = other RNA
tactggcgcttttatctcattactttgagagccatcaccagcgactatgtcgtatgggtaaagcggggttagggttagggttagggaagcatcaaag

SEQ ID NO: 2156 - RNA, 96 nt, synthetic construct
  misc_feature 1..96: note = gNA Variant Scaffold
  source 1..96: mol_type = other RNA
tactggcgcttttatctcattactttgagagccatcaccagcgactatgtcgtatgggtaaagcggagggagggagggagagggaaagcatcaaag

SEQ ID NO: 2157 - RNA, 101 nt, synthetic construct
  misc_feature 1..101: note = gNA Variant Scaffold
  source 1..101: mol_type = other RNA
tactggcgcttttatctcattactttgagagccatcaccagcgactatgtcgtatgggtaaagcgttgggttagggttagggttagggaaaagcatcaaag

SEQ ID NO: 2158 - RNA, 91 nt, synthetic construct
  misc_feature 1..91: note = gNA Variant Scaffold
  source 1..91: mol_type = other RNA
tactggcgcttttatctcattactttgagagccatcaccagcgactatgtcgtatgggtaaagcgcagggcttcggccggaagcatcaaag

SEQ ID NO: 2159 - RNA, 103 nt, synthetic construct
  misc_feature 1..103: note = gNA Variant Scaffold
  source 1..103: mol_type = other RNA
tactggcgcttttatctcattactttgagagccatcaccagcgactatgtcgtatgggtaaagcgcctgctcagtacgagaggaaccgcaggaagcatcaaag

SEQ ID NO: 2160 - RNA, 90 nt, synthetic construct
  misc_feature 1..90: note = gNA Variant Scaffold
  source 1..90: mol_type = other RNA
tactggcgcttttatctgattactttgagagccatcaccagcgactatgtcgtatgggtaaagcgccctcttcggagggaagcatcaaag

SEQ ID NO: 2161 - RNA, 98 nt, synthetic construct
  misc_feature 1..98: note = gNA Variant Scaffold
  source 1..98: mol_type = other RNA
tactggcgcctttatctgattactttgagagccatcaccagcgactatgtcgtatgggtaaagcgcttacggacttcggtccgtaagaagcatcaaag

SEQ ID NO: 2162 - RNA, 98 nt, synthetic construct
  misc_feature 1..98: note = gNA Variant Scaffold
  source 1..98: mol_type = other RNA
tactggcgcttttatctgattactttgagagccatcaccagcgactatgtcgtatgggtaaagcgcggacgacctctcggtcgtccgaagcatcaaag

SEQ ID NO: 2163 - RNA, 108 nt, synthetic construct
  misc_feature 1..108: note = gNA Variant Scaffold
  source 1..108: mol_type = other RNA
tactggcgcttttatctgattactttgagagccatcaccagcgactatgtcgtatgggtaaagcgcaggtgggacgacctctcggtcgtcctatctgaagcatcaaag

SEQ ID NO: 2164 - RNA, 99 nt, synthetic construct
  misc_feature 1..99: note = gNA Variant Scaffold
  source 1..99: mol_type = other RNA
tactggcgcctttatctgcattactttgagagccatcaccagcgactatgtcgtatgggtaaagcgcttacggacttcggtccgtaagaagcatcaaag

SEQ ID NO: 2165 - RNA, 97 nt, synthetic construct
  misc_feature 1..97: note = gNA Variant Scaffold
  source 1..97: mol_type = other RNA
gctggcgcttttatctgattactttgagagccatcaccagcgactatgtcgtatgggtaaagcgcttacggacttcggtccgtaagaagcatcaaag

SEQ ID NO: 2166 - RNA, 108 nt, synthetic construct
  misc_feature 1..108: note = gNA Variant Scaffold
  source 1..108: mol_type = other RNA
tactggcgcctttatctgattactttgagagccatcaccagcgactatgtcgtatgggtaaagcgcaggtgggacgacctctcggtcgtcctatctgaagcatcaaag

SEQ ID NO: 2167 - RNA, 98 nt, synthetic construct
  misc_feature 1..98: note = gNA Variant Scaffold
  source 1..98: mol_type = other RNA
tactggcgcctttatctgattactttgagagccatcaccagcgactatgtcgtatgggtaaagcgcggacgacctctcggtcgtccgaagcatcaaag

SEQ ID NO: 2168 - RNA, 90 nt, synthetic construct
  misc_feature 1..90: note = gNA Variant Scaffold
  source 1..90: mol_type = other RNA
tactggcgcctttatctcattactttgagagccatcaccagcgactatgtcgtatgggtaaagcgccctcttcggagggaagcatcaaag

SEQ ID NO: 2169 - RNA, 98 nt, synthetic construct
  misc_feature 1..98: note = gNA Variant Scaffold
  source 1..98: mol_type = other RNA
tactggcgcttttatctcattactttgagagccatcaccagcgactatgtcgtatgggtaaagcgcttacggacttcggtccgtaagaagcatcaaag

SEQ ID NO: 2170 - RNA, 99 nt, synthetic construct
  misc_feature 1..99: note = gNA Variant Scaffold
  source 1..99: mol_type = other RNA
tactggcgcctttatcatcattactttgagagccatcaccagcgactatgtcgtatgggtaaagcgcttacggacttcggtccgtaagaagcatcaaag

SEQ ID NO: 2171 - RNA, 194 nt, synthetic construct
  misc_feature 1..194: note = gNA Variant Scaffold
  source 1..194: mol_type = other RNA
tactggcgcttttatctcattactttgagagccatcaccagcgactatgtcgtatgggtaaagcgcttatttatcggagagaaatccgataaataagaagcatcaaagggccggcatggtcccagcctcctcgctggcgccggctgggcaacattccgaggggaccgtcccctcggtaatggcgaatgggaccc

SEQ ID NO: 2172 - RNA, 108 nt, synthetic construct
  misc_feature 1..108: note = gNA Variant Scaffold
  source 1..108: mol_type = other RNA
tactggcgcctttatctcattactttgagagccatcaccagcgactatgtcgtatgggtaaagcgcaggtgggacgacctctcggtcgtcctatctgaagcatcaaag

SEQ ID NO: 2173 - RNA, 106 nt, synthetic construct
  misc_feature 1..106: note = gNA Variant Scaffold
  source 1..106: mol_type = other RNA
tactggcgcttttatctcattactttgagagccatcaccagcgactatgtcgtatgggtaaagcgcttatttatcggagaaatccgataaataagaagcatcaaag

SEQ ID NO: 2174 - RNA, 98 nt, synthetic construct
  misc_feature 1..98: note = gNA Variant Scaffold
  source 1..98: mol_type = other RNA
tactggcgcctttatctcattactttgagagccatcaccagcgactatgtcgtatgggtaaagcgcggacgacctctcggtcgtccgaagcatcaaag

SEQ ID NO: 2175 - RNA, 92 nt, synthetic construct
  misc_feature 1..92: note = gNA Variant Scaffold
  source 1..92: mol_type = other RNA
tactggcgcttttatctcattactttgagagccatcaccagcgactatgtcgtatgggtaaagcgccggacttcggtccggaagcatcaaag

SEQ ID NO: 2176 - RNA, 108 nt, synthetic construct
  misc_feature 1..108: note = gNA Variant Scaffold
  source 1..108: mol_type = other RNA
tactggcgcttttatcggattactttgagagccatcaccagcgactatgtcgtatgggtaaagcgcttatttatcggagagaaatccgataaataagaagcatcaaag

SEQ ID NO: 2177 - RNA, 98 nt, synthetic construct
  misc_feature 1..98: note = gNA Variant Scaffold
  source 1..98: mol_type = other RNA
tactggcgcttttatctcattactttgagagccatcaccagcgactatgtcgtatgggtaaagcgcggacgacctctcggtcgtccgaagcatcaaag

SEQ ID NO: 2178 - RNA, 89 nt, synthetic construct
  misc_feature 1..89: note = gNA Variant Scaffold
  source 1..89: mol_type = other RNA
gctggcgcttttatctgattactttgagagccatcaccagcgactatgtcgtatgggtaaagcgccctcttcggagggaagcatcaaag

SEQ ID NO: 2179 - RNA, 88 nt, synthetic construct
  misc_feature 1..88: note = gNA Variant Scaffold
  source 1..88: mol_type = other RNA
gctggcgcctttatctgattactttgagagccatcaccagcgactatgtcgtatgggtaaagctccctcttcggagggagcatcaaag

SEQ ID NO: 2180 - RNA, 197 nt, synthetic construct
  misc_feature 1..197: note = gNA Variant Scaffold
  source 1..197: mol_type = other RNA
tactggcgcttttatctcattactttgagagccatcaccagcgactatgtcgtatgggtaaagcgcttatttatcggagagaaatccgataaataagaagcatcaaaggggtcggcatggcatctccacctcctcgcggtccgacctgggcatccgaaggaggacgcacgtccactcggatggctaagggagagcca

SEQ ID NO: 2181 - RNA, 88 nt, synthetic construct
  misc_feature 1..88: note = gNA Variant Scaffold
  source 1..88: mol_type = other RNA
gctggcgcctttatctgattactttgagagccatcaccagcgactatgtcgtatgggtaaagcgccctcttcggagggcgcatcaaag

SEQ ID NO: 2182 - RNA, 186 nt, synthetic construct
  misc_feature 1..186: note = gNA Variant Scaffold
  source 1..186: mol_type = other RNA
tactggcgcttttatctcattactttgagagccatcaccagcgactatgtcgtatgggtaaagcgcttatttatcggagagaaatccgataaataagaagcatcaaagttttggccggcatggtcccagcctcctcgctggcgccggctgggcaacatgcttcggcatggcgaatgggaccccggg

SEQ ID NO: 2183 - RNA, 97 nt, synthetic construct
  misc_feature 1..97: note = gNA Variant Scaffold
  source 1..97: mol_type = other RNA
gatggcgcctttatctcattactttgagagccatcaccagcgactatgtcgtatgggtaaagcgcttacggacttcggtccgtaagaagcatcaaag

SEQ ID NO: 2184 - RNA, 89 nt, synthetic construct
  misc_feature 1..89: note = gNA Variant Scaffold
  source 1..89: mol_type = other RNA
gctggcgcttttatctcattactttgagagccatcaccagcgactatgtcgtatgggtaaagcgccctcttcggagggaagcatcaaag

SEQ ID NO: 2185 - RNA, 96 nt, synthetic construct
  misc_feature 1..96: note = gNA Variant Scaffold
  source 1..96: mol_type = other RNA
gctggcgcctttatctgattactttgagagccatcaccagcgactatgtcgtatgggtaaagctcttacggacttcggtccgtaagagcatcaaag

SEQ ID NO: 2186 - RNA, 96 nt, synthetic construct
  misc_feature 1..96: note = gNA Variant Scaffold
  source 1..96: mol_type = other RNA
gctggcgcctttatctgattactttgagagccatcaccagcgactatgtcgtatgggtaaagctcggacgacctctcggtcgtccgagcatcaaag

SEQ ID NO: 2187 - RNA, 160 nt, synthetic construct
  misc_feature 1..160: note = gNA Variant Scaffold
  source 1..160: mol_type = other RNA
tactggcgcttttatctcattactttgagagccatcaccagcgactatgtcgtatgggtaaagcgcttatttatcggagagaaatccgataaataagaagcatcaaagcctgtcaccggatgtgctttccggtctgatgagtccgtgaggacgaaacagg

SEQ ID NO: 2188 - RNA, 97 nt, synthetic construct
  misc_feature 1..97: note = gNA Variant Scaffold
  source 1..97: mol_type = other RNA
gctggcgcttttatctgattactttgagagccatcaccagcgactatgtcgtatgggtaaagcgcggacgacctctcggtcgtccgaagcatcaaag

SEQ ID NO: 2189 - RNA, 97 nt, synthetic construct
  misc_feature 1..97: note = gNA Variant Scaffold
  source 1..97: mol_type = other RNA
gctggcgcctttatctgattactttgagagccatcaccagcgactatgtcgtatgggtaaagcgcggacgacctctcggtcgtccgaagcatcaaag

SEQ ID NO: 2190 - RNA, 106 nt, synthetic construct
  misc_feature 1..106: note = gNA Variant Scaffold
  source 1..106: mol_type = other RNA
gctggcgcctttatctgattactttgagagccatcaccagcgactatgtcgtatgggtaaagctcaggtgggacgacctctcggtcgtcctatctgagcatcaaag

SEQ ID NO: 2191 - RNA, 177 nt, synthetic construct
  misc_feature 1..177: note = gNA Variant Scaffold
  source 1..177: mol_type = other RNA
tactggcgcttttatctcattactttgagagccatcaccagcgactatgtcgtatgggtaaagcgcttatttatcggagagaaatccgataaataagaagcatcaaaggatggccggcatggtcccagcctcctcgctggcgccggctgggcaacaccttcgggtggcgaatgggac

SEQ ID NO: 2192 - RNA, 107 nt, synthetic construct
  misc_feature 1..107: note = gNA Variant Scaffold
  source 1..107: mol_type = other RNA
gctggcgcttttatctgattactttgagagccatcaccagcgactatgtcgtatgggtaaagcgcaggtgggacgacctctcggtcgtcctatctgaagcatcaaag

SEQ ID NO: 2193 - RNA, 109 nt, synthetic construct
  misc_feature 1..109: note = gNA Variant Scaffold
  source 1..109: mol_type = other RNA
tactggcgcttttatctcattactttgagagccatcaccagcgactatgtcgtactgggtaaagcgcttatttatcggagagaaatccgataaataagaagcatcaaag

SEQ ID NO: 2194 - RNA, 107 nt, synthetic construct
  misc_feature 1..107: note = gNA Variant Scaffold
  source 1..107: mol_type = other RNA
tactggcgcttttatctcattactttgagagccatcaccagcgactatgtcgtatgggtaaagcgcttatttatcgtgagaaatccgataaataagaagcatcaaag

SEQ ID NO: 2195 - RNA, 109 nt, synthetic construct
  misc_feature 1..109: note = gNA Variant Scaffold
  source 1..109: mol_type = other RNA
gtactggcgcttttatctcattactttgagagccatcaccagcgactatgtcgtatgggtaaagcgcttatttatcggagagaaatccgataaataagaagcatcaaag

SEQ ID NO: 2196 - RNA, 97 nt, synthetic construct
  misc_feature 1..97: note = gNA Variant Scaffold
  source 1..97: mol_type = other RNA
gctggcgcttttatctcattactttgagagccatcaccagcgactatgtcgtatgggtaaagcgcggacgacctctcggtcgtccgaagcatcaaag

SEQ ID NO: 2197 - RNA, 97 nt, synthetic construct
  misc_feature 1..97: note = gNA Variant Scaffold
  source 1..97: mol_type = other RNA
gctggcgcctttatctgattactttgagagccatcaccagcgactatgtcgtatgggtaaagcgcttacggacttcggtccgtaagaagcatcaaag

SEQ ID NO: 2198 - RNA, 107 nt, synthetic construct
  misc_feature 1..107: note = gNA Variant Scaffold
  source 1..107: mol_type = other RNA
gctggcgcttttatctcattactttgagagccatcaccagcgactatgtcgtatgggtaaagcgcttatttatcggagagaaatccgataaataagaagcatcaaag

SEQ ID NO: 2199 - RNA, 97 nt, synthetic construct
  misc_feature 1..97: note = gNA Variant Scaffold
  source 1..97: mol_type = other RNA
gctggcgcctttatctcattactttgagagccatcaccagcgactatgtcgtatgggtaaagcgcttacggacttcggtccgtaagaagcatcaaag

SEQ ID NO: 2200 - RNA, 89 nt, synthetic construct
  misc_feature 1..89: note = gNA Variant Scaffold
  source 1..89: mol_type = other RNA
gctggcgcctttatctgattactttgagagccatcaccagcgactatgtcgtatgggtaaagcgccctcttcggagggaagcatcaaag

SEQ ID NO: 2201 - RNA, 107 nt, synthetic construct
  misc_feature 1..107: note = gNA Variant Scaffold
  source 1..107: mol_type = other RNA
gctggcgcttttatctcattactttgagagccatcaccagcgactatgtcgtatgggtaaagcgcaggtgggacgacctctcggtcgtcctatctgaagcatcaaag

SEQ ID NO: 2202 - RNA, 107 nt, synthetic construct
  misc_feature 1..107: note = gNA Variant Scaffold
  source 1..107: mol_type = other RNA
gctggcgcctttatctcattactttgagagccatcaccagcgactatgtcgtatgggtaaagcgcaggtgggacgacctctcggtcgtcctatctgaagcatcaaag

SEQ ID NO: 2203 - RNA, 107 nt, synthetic construct
  misc_feature 1..107: note = gNA Variant Scaffold
  source 1..107: mol_type = other RNA
gctggcgcctttatctgattactttgagagccatcaccagcgactatgtcgtatgggtaaagcgcaggtgggacgacctctcggtcgtcctatctgaagcatcaaag

SEQ ID NO: 2204 - RNA, 98 nt, synthetic construct
  misc_feature 1..98: note = gNA Variant Scaffold
  source 1..98: mol_type = other RNA
tactggcgcttttatctgattactttgagagccatcaccagcgactatgtcgtatgggtaaagcgcttacggacttcggtccgtaagaagcatcaaag

SEQ ID NO: 2205 - RNA, 89 nt, synthetic construct
  misc_feature 1..89: note = gNA Variant Scaffold
  source 1..89: mol_type = other RNA
gctggcgcctttatctcattactttgagagccatcaccagcgactatgtcgtatgggtaaagcgccctcttcggagggaagcatcaaag

SEQ ID NO: 2206 - RNA, 97 nt, synthetic construct
  misc_feature 1..97: note = gNA Variant Scaffold
  source 1..97: mol_type = other RNA
gctggcgcttttatctcattactttgagagccatcaccagcgactatgtcgtatgggtaaagcgcttacggacttcggtccgtaagaagcatcaaag

SEQ ID NO: 2207 - RNA, 97 nt, synthetic construct
  misc_feature 1..97: note = gNA Variant Scaffold
  source 1..97: mol_type = other RNA
gctggcgcctttatctcattactttgagagccatcaccagcgactatgtcgtatgggtaaagcgcggacgacctctcggtcgtccgaagcatcaaag

SEQ ID NO: 2208 - RNA, 177 nt, synthetic construct
  misc_feature 1..177: note = gNA Variant Scaffold
  source 1..177: mol_type = other RNA
gatggccggcatggtcccagcctcctcgctggcgccggctgggcaacaccttcgggtggcgaatgggactactggcgcttttatctcattactttgagagccatcaccagcgactatgtcgtatgggtaaagcgcttatttatcggagagaaatccgataaataagaagcatcaaag

SEQ ID NO: 2209 - RNA, 194 nt, synthetic construct
  misc_feature 1..194: note = gNA Variant Scaffold
  source 1..194: mol_type = other RNA
ggccggcatggtcccagcctcctcgctggcgccggctgggcaacattccgaggggaccgtcccctcggtaatggcgaatgggaccctactggcgcttttatctcattactttgagagccatcaccagcgactatgtcgtatgggtaaagcgcttatttatcggagagaaatccgataaataagaagcatcaaag

SEQ ID NO: 2210 - RNA, 96 nt, synthetic construct
  misc_feature 1..96: note = gNA Variant Scaffold
  source 1..96: mol_type = other RNA
gctggcgcctttatctgattactttgagagccatcaccagcgactatgtcgtatgggtaaagcgcttacggacttcggtccgtaagcgcatcaaag

SEQ ID NO: 2211 - RNA, 172 nt, synthetic construct
  misc_feature 1..172: note = gNA Variant Scaffold
  source 1..172: mol_type = other RNA
cgtggttagggccacgttaaatagttgcttaagccctaagcgttgatcttcggatcaggtgcaatactggcgcttttatctcattactttgagagccatcaccagcgactatgtcgtatgggtaaagcgcttatttatcggagagaaatccgataaataagaagcatcaaag

SEQ ID NO: 2212 - RNA, 197 nt, synthetic construct
  misc_feature 1..197: note = gNA Variant Scaffold
  source 1..197: mol_type = other RNA
gggtcggcatggcatctccacctcctcgcggtccgacctgggcatccgaaggaggacgcacgtccactcggatggctaagggagagccatactggcgcttttatctcattactttgagagccatcaccagcgactatgtcgtatgggtaaagcgcttatttatcggagagaaatccgataaataagaagcatcaaag

SEQ ID NO: 2213 - RNA, 171 nt, synthetic construct
  misc_feature 1..171: note = gNA Variant Scaffold
  source 1..171: mol_type = other RNA
tactggcgcttttatctcattactttgagagccatcaccagcgactatgtcgtatgggtaaagcgcttatttatcggagagaaatccgataaataagaagcatcaaagccagtactgatgagtccgtgaggacgaaacgagtaagctcgtctactggcgcttttatctcat

SEQ ID NO: 2214 - RNA, 99 nt, synthetic construct
  misc_feature 1..99: note = gNA Variant Scaffold
  source 1..99: mol_type = other RNA
tactggcgcctttatctcattactttagagagccatcaccagcgactatgtcgtatgggtaaagcgcttacggacttcggtccgtaagaagcatcaaag

SEQ ID NO: 2215 - RNA, 157 nt, synthetic construct
  misc_feature 1..157: note = gNA Variant Scaffold
  source 1..157: mol_type = other RNA
cgactactgatgagtccgtgaggacgaaacgagtaagctcgtctagtcgtactggcgcttttatctcattactttgagagccatcaccagcgactatgtcgtatgggtaaagcgcttatttatcggagagaaatccgataaataagaagcatcaaag

SEQ ID NO: 2216 - RNA, 106 nt, synthetic construct
  misc_feature 1..106: note = gNA Variant Scaffold
  source 1..106: mol_type = other RNA
gctggcgcctttatctgattactttgagagccatcaccagcgactatgtcgtatgggtaaagcgcaggtgggacgacctctcggtcgtcctatctgcgcatcaaag

SEQ ID NO: 2217 - RNA, 97 nt, synthetic construct
  misc_feature 1..97: note = gNA Variant Scaffold
  source 1..97: mol_type = other RNA
tactggcgcctttatctcattactttagagccatcaccagcgactatgtcgtatgggtaaagcgcttacggacttcggtccgtaagaagcatcaaag

SEQ ID NO: 2218 - RNA, 186 nt, synthetic construct
  misc_feature 1..186: note = gNA Variant Scaffold
  source 1..186: mol_type = other RNA
tactggcgcttttatctcattactttgagagccatcaccagcgactatgtcgtatgggtaaagcgcttatttatcggagagaaatccgataaataagaagcatcaaagcattcctcagaaaatgacaaacctgtggggcgtaagtagatcttcggatctatgatcgtgcagacgttaaaatcaggt

SEQ ID NO: 2219 - RNA, 171 nt, synthetic construct
  misc_feature 1..171: note = gNA Variant Scaffold
  source 1..171: mol_type = other RNA
tactggcgcttttatctcattactttgagagccatcaccagcgactatgtcgtatgggtaaagcgcttatttatcggagagaaatccgataaataagaagcatcaaagcgactactgatgagtccgtgaggacgaaacgagtaagctcgtctagtcgcgtgtagcgaagca

SEQ ID NO: 2220 - RNA, 186 nt, synthetic construct
  misc_feature 1..186: note = gNA Variant Scaffold
  source 1..186: mol_type = other RNA
cattcctcagaaaatgacaaacctgtggggcgtaagtagatcttcggatctatgatcgtgcagacgttaaaatcaggttactggcgcttttatctcattactttgagagccatcaccagcgactatgtcgtatgggtaaagcgcttatttatcggagagaaatccgataaataagaagcatcaaag

SEQ ID NO: 2221 - RNA, 186 nt, synthetic construct
  misc_feature 1..186: note = gNA Variant Scaffold
  source 1..186: mol_type = other RNA
ttttggccggcatggtcccagcctcctcgctggcgccggctgggcaacatgcttcggcatggcgaatgggaccccgggtactggcgcttttatctcattactttgagagccatcaccagcgactatgtcgtatgggtaaagcgcttatttatcggagagaaatccgataaataagaagcatcaaag

SEQ ID NO: 2222 - RNA, 171 nt, synthetic construct
  misc_feature 1..171: note = gNA Variant Scaffold
  source 1..171: mol_type = other RNA
cgactactgatgagtccgtgaggacgaaacgagtaagctcgtctagtcgcgtgtagcgaagcatactggcgcttttatctcattactttgagagccatcaccagcgactatgtcgtatgggtaaagcgcttatttatcggagagaaatccgataaataagaagcatcaaag

SEQ ID NO: 2223 - RNA, 168 nt, synthetic construct
  misc_feature 1..168: note = gNA Variant Scaffold
  source 1..168: mol_type = other RNA
tactggcgcttttatctcattactttgagagccatcaccagcgactatgtcgtatgggtaaagcgcttatttatcggagagaaatccgataaataagaagcatcaaaggggagccccgctgatgaggtcggggagaccgaaagggacttcggtccctacggggctccc

SEQ ID NO: 2224 - RNA, 144 nt, synthetic construct
  misc_feature 1..144: note = gNA Variant Scaffold
  source 1..144: mol_type = other RNA
ccacccccaccaccacccccacccccaccaccaccctactggcgcttttatctcattactttgagagccatcaccagcgactatgtcgtatgggtaaagcgcttatttatcggagagaaatccgataaataagaagcatcaaag

SEQ ID NO: 2225 - RNA, 157 nt, synthetic construct
  misc_feature 1..157: note = gNA Variant Scaffold
  source 1..157: mol_type = other RNA
tactggcgcttttatctcattactttgagagccatcaccagcgactatgtcgtatgggtaaagcgcttatttatcggagagaaatccgataaataagaagcatcaaagcgactactgatgagtccgtgaggacgaaacgagtaagctcgtctagtcg

SEQ ID NO: 2226 - RNA, 172 nt, synthetic construct
  misc_feature 1..172: note = gNA Variant Scaffold
  source 1..172: mol_type = other RNA
tactggcgcttttatctcattactttgagagccatcaccagcgactatgtcgtatgggtaaagcgcttatttatcggagagaaatccgataaataagaagcatcaaagcgtggttagggccacgttaaatagttgcttaagccctaagcgttgatcttcggatcaggtgcaa

SEQ ID NO: 2227 - RNA, 184 nt, synthetic construct
  misc_feature 1..184: note = gNA Variant Scaffold
  source 1..184: mol_type = other RNA
tactggcgcttttatctcattactttgagagccatcaccagcgactatgtcgtatgggtaaagcgcttatttatcggagagaaatccgataaataagaagcatcaaagggcaataaagcggttacaagcccgcaaaaatagcagagtaatgtcgcgatagcgcggcattaatgcagctttattg

SEQ ID NO: 2228 - RNA, 122 nt, synthetic construct
  misc_feature 1..122: note = gNA Variant Scaffold
  source 1..122: mol_type = other RNA
tactggcgcttttatctcattactattatctcattactttgagagccatcaccagcgactatgtcgtatgggtaaagcgcttatttatcggagagaaatccgataaataagaagcatcaaag

SEQ ID NO: 2229 - RNA, 184 nt, synthetic construct
  misc_feature 1..184: note = gNA Variant Scaffold
  source 1..184: mol_type = other RNA
ggcaataaagcggttacaagcccgcaaaaatagcagagtaatgtcgcgatagcgcggcattaatgcagctttattgtactggcgcttttatctcattactttgagagccatcaccagcgactatgtcgtatgggtaaagcgcttatttatcggagagaaatccgataaataagaagcatcaaag

SEQ ID NO: 2230 - RNA, 185 nt, synthetic construct
  misc_feature 1..185: note = gNA Variant Scaffold
  source 1..185: mol_type = other RNA
tactggcgcttttatctcattactttgagagccatcaccagcgactatgtcgtatgggtaaagcgcttatttatcggagagaaatccgataaataagaagcatcaaagacccgcaaggccgacggcatccgccgccgctggtgcaagtccagccgccccttcgggggcgggcgctcatgggtaac

SEQ ID NO: 2231 - RNA, 63 nt, synthetic construct
  misc_feature 1..63: note = gNA Variant Scaffold
  source 1..63: mol_type = other RNA
tactggcgcttttatctcattactttgagagccatcaccagcgactatgtcgtatgggtaaag

SEQ ID NO: 2232 - RNA, 168 nt, synthetic construct
  misc_feature 1..168: note = gNA Variant Scaffold
  source 1..168: mol_type = other RNA
gggagccccgctgatgaggtcggggagaccgaaagggacttcggtccctacggggctccctactggcgcttttatctcattactttgagagccatcaccagcgactatgtcgtatgggtaaagcgcttatttatcggagagaaatccgataaataagaagcatcaaag

SEQ ID NO: 2233 - RNA, 171 nt, synthetic construct
  misc_feature 1..171: note = gNA Variant Scaffold
  source 1..171: mol_type = other RNA
ccagtactgatgagtccgtgaggacgaaacgagtaagctcgtctactggcgcttttatctcattactggcgcttttatctcattactttgagagccatcaccagcgactatgtcgtatgggtaaagcgcttatttatcggagagaaatccgataaataagaagcatcaaag

SEQ ID NO: 2234 - RNA, 185 nt, synthetic construct
  misc_feature 1..185: note = gNA Variant Scaffold
  source 1..185: mol_type = other RNA
acccgcaaggccgacggcatccgccgccgctggtgcaagtccagccgccccttcgggggcgggcgctcatgggtaactactggcgcttttatctcattactttgagagccatcaccagcgactatgtcgtatgggtaaagcgcttatttatcggagagaaatccgataaataagaagcatcaaag

SEQ ID NO: 2235 - RNA, 160 nt, synthetic construct
  misc_feature 1..160: note = gNA Variant Scaffold
  source 1..160: mol_type = other RNA
cctgtcaccggatgtgctttccggtctgatgagtccgtgaggacgaaacaggtactggcgcttttatctcattactttgagagccatcaccagcgactatgtcgtatgggtaaagcgcttatttatcggagagaaatccgataaataagaagcatcaaag

SEQ ID NO: 2236 - RNA, 100 nt, synthetic construct
  misc_feature 1..100: note = gNA Variant Scaffold
  source 1..100: mol_type = other RNA
gtactggcgcctttatctcattactttgagagccatcaccagcgactatgtcgtagtgggtaaagcgcttacggacttcggtccgtaagaagcatcaaag

SEQ ID NO: 2237 - RNA, 91 nt, synthetic construct
  misc_feature 1..91: note = gNA Variant Scaffold
  source 1..91: mol_type = other RNA
gtactggcgcttttatctgattactttgagagccatcaccagcgactatgtcgtagtgggtaaagctccctcttcggagggagcatcaaag

SEQ ID NO: 2238 - RNA, 89 nt, synthetic construct
  misc_feature 1..89: note = gNA Variant Scaffold
  source 1..89: mol_type = other RNA
actggcgcttttatctgattactttgagagccatcaccagcgactatgtcgtagtgggtaaagctccctcttcggagggagcatcaaag

SEQ ID NO: 2239 - RNA, 97 nt, synthetic construct
  misc_feature 1..97: note = gNA Variant Scaffold
  source 1..97: mol_type = other RNA
actggcgcctttatctcattactttgagagccatcaccagcgactatgtcgtatgggtaaagcgcttacggacttcggtccgtaagaagcatcaaag

SEQ ID NO: 2240 - RNA, 89 nt, synthetic construct
  misc_feature 1..89: note = gNA Variant Scaffold
  source 1..89: mol_type = other RNA
gctggcgcttttatctgattactttgagagccatcaccagcgactatgtcgtagtgggtaaagctccctcttcggagggagcatcaaag

SEQ ID NO: 2241 - RNA, 88 nt, synthetic construct
  misc_feature 1..88: note = gNA Variant Scaffold
  source 1..88: mol_type = other RNA
actggcgcttttatctgattactttgagagccatcaccagcgactatgtcgtatgggtaaagctccctcttcggagggagcatcaaag

SEQ ID NO: 2242 - RNA, 97 nt, synthetic construct
  misc_feature 1..97: note = gNA Variant Scaffold
  source 1..97: mol_type = other RNA
actggcgcctttatctgattactttgagagccatcaccagcgactatgtcgtatgggtaaagcgcttacggacttcggtccgtaagaagcatcaaag

SEQ ID NO: 2243 - RNA, 97 nt, synthetic construct
  misc_feature 1..97: note = gNA Variant Scaffold
  source 1..97: mol_type = other RNA
actggcgcttttatctgattactttgagagccatcaccagcgactatgtcgtatgggtaaagcgcttacggacttcggtccgtaagaagcatcaaag

SEQ ID NO: 2244 - RNA, 98 nt, synthetic construct
  misc_feature 1..98: note = gNA Variant Scaffold
  source 1..98: mol_type = other RNA
actggcgcttttatctgattactttgagagccatcaccagcgactatgtcgtagtgggtaaagcgcttacggacttcggtccgtaagaagcatcaaag

SEQ ID NO: 2245 - RNA, 89 nt, synthetic construct
  misc_feature 1..89: note = gNA Variant Scaffold
  source 1..89: mol_type = other RNA
actggcgcttttatctgattactttgagagccatcaccagcgactatgtcgtattgggtaaagctccctcttcggagggagcatcaaag

SEQ ID NO: 2246 - RNA, 98 nt, synthetic construct
  misc_feature 1..98: note = gNA Variant Scaffold
  source 1..98: mol_type = other RNA
actggcgcttttatctgattactttgagagccatcaccagcgactatgtcgtattgggtaaagcgcttacggacttcggtccgtaagaagcatcaaag

SEQ ID NO: 2247 - RNA, 98 nt, synthetic construct
  misc_feature 1..98: note = gNA Variant Scaffold
  source 1..98: mol_type = other RNA
actggcgcctttatcatcattactttgagagccatcaccagcgactatgtcgtatgggtaaagcgcttacggacttcggtccgtaagaagcatcaaag

SEQ ID NO: 2248 - RNA, 90 nt, synthetic construct
  misc_feature 1..90: note = gNA Variant Scaffold
  source 1..90: mol_type = other RNA
actggcgcttttatctgattactttgagagccatcaccagcgactatgtcgtagtgggtaaagcgccctcttcggagggaagcatcaaag

SEQ ID NO: 2249 - RNA, 96 nt, synthetic construct
  misc_feature 1..96: note = gNA Variant Scaffold
  source 1..96: mol_type = other RNA
actggcgcttttatctgattactttgagagccatcaccagcgactatgtcgtagtgggtaaagctcacatgaggatcacccatgtgagcatcaaag

SEQ ID NO: 2250 - RNA, 89 nt, synthetic construct
  misc_feature 1..89: note = gNA Variant Scaffold
  source 1..89: mol_type = other RNA
actggcacttttacctgattactttgagagccaacaccagcgactatgtcgtagtgggtaaagctccctcttcggagggagcatcaaag

SEQ ID NO: 2251 - RNA, 89 nt, synthetic construct
  misc_feature 1..89: note = gNA Variant Scaffold
  source 1..89: mol_type = other RNA
actggcacttttatctgattactttgagagccatcaccagcgactatgtcgtagtgggtaaagctccctcttcggagggagcatcaaag

SEQ ID NO: 2252 - RNA, 89 nt, synthetic construct
  misc_feature 1..89: note = gNA Variant Scaffold
  source 1..89: mol_type = other RNA
actggcccttttatctgattactttgagagccatcaccagcgactatgtcgtagtgggtaaagctccctcttcggagggagcatcaaag

SEQ ID NO: 2253 - RNA, 89 nt, synthetic construct
  misc_feature 1..89: note = gNA Variant Scaffold
  source 1..89: mol_type = other RNA
actggcgcttttacctgattactttgagagccatcaccagcgactatgtcgtagtgggtaaagctccctcttcggagggagcatcaaag

SEQ ID NO: 2254 - RNA, 89 nt, synthetic construct
  misc_feature 1..89: note = gNA Variant Scaffold
  source 1..89: mol_type = other RNA
actggcgcttttatctgattactttgagagccaacaccagcgactatgtcgtagtgggtaaagctccctcttcggagggagcatcaaag

SEQ ID NO: 2255 - RNA, 97 nt, synthetic construct
  misc_feature 1..97: note = gNA Variant Scaffold
  source 1..97: mol_type = other RNA
actggcacctttacctgattactttgagagccaacaccagcgactatgtcgtatgggtaaagcgcttacggacttcggtccgtaagaagcatcaaag

SEQ ID NO: 2256 - RNA, 97 nt, synthetic construct
  misc_feature 1..97: note = gNA Variant Scaffold
  source 1..97: mol_type = other RNA
actggcacctttatctgattactttgagagccatcaccagcgactatgtcgtatgggtaaagcgcttacggacttcggtccgtaagaagcatcaaag

SEQ ID NO: 2257 - RNA, 97 nt, synthetic construct
  misc_feature 1..97: note = gNA Variant Scaffold
  source 1..97: mol_type = other RNA
actggcccctttatctgattactttgagagccatcaccagcgactatgtcgtatgggtaaagcgcttacggacttcggtccgtaagaagcatcaaag

SEQ ID NO: 2258 - RNA, 97 nt, synthetic construct
  misc_feature 1..97: note = gNA Variant Scaffold
  source 1..97: mol_type = other RNA
actggcgcctttatctgattactttgagagccaacaccagcgactatgtcgtatgggtaaagcgcttacggacttcggtccgtaagaagcatcaaag

SEQ ID NO: 2259 - RNA, 89 nt, synthetic construct; identical to SEQ ID NO: 2240
  misc_feature 1..89: note = gNA Variant Scaffold
  source 1..89: mol_type = other RNA

SEQ ID NO: 2260 - RNA, 90 nt, synthetic construct
  misc_feature 1..90: note = gNA Variant Scaffold
  source 1..90: mol_type = other RNA
gactggcgcttttatctgattactttgagagccatcaccagcgactatgtcgtagtgggtaaagctccctcttcggagggagcatcaaag

SEQ ID NO: 2261 - RNA, 90 nt, synthetic construct
  misc_feature 1..90: note = gNA Variant Scaffold
  source 1..90: mol_type = other RNA
actggcgcctttatctgattactttggagagccatcaccagcgactatgtcgtagtgggtaaagctccctcttcggagggagcatcaaag

SEQ ID NO: 2262 - RNA, 89 nt, synthetic construct
  misc_feature 1..89: note = gNA Variant Scaffold
  source 1..89: mol_type = other RNA
actggcgcatttatctgattactttgtgagccatcaccagcgactatgtcgtagtgggtaaagctccctcttcggagggagcatcaaag

SEQ ID NO: 2263 - RNA, 89 nt, synthetic construct
  misc_feature 1..89: note = gNA Variant Scaffold
  source 1..89: mol_type = other RNA
actggcgcctttatctgattactttgagagccatcaccagcgactatgtcgtagtgggtaaagctccctcttcggagggagcatcaaag

SEQ ID NO: 2264 - RNA, 90 nt, synthetic construct
  misc_feature 1..90: note = gNA Variant Scaffold
  source 1..90: mol_type = other RNA
actggcgcttttatctgattactttggagagccatcaccagcgactatgtcgtagtgggtaaagctccctcttcggagggagcatcaaag

SEQ ID NO: 2265 - RNA, 89 nt, synthetic construct
  misc_feature 1..89: note = gNA Variant Scaffold
  source 1..89: mol_type = other RNA
actggcgcatttatctgattactttgagagccatcaccagcgactatgtcgtagtgggtaaagctccctcttcggagggagcatcaaag

SEQ ID NO: 2266 - RNA, 89 nt, synthetic construct
  misc_feature 1..89: note = gNA Variant Scaffold
  source 1..89: mol_type = other RNA
actggcgcttttatctgattactttgtgagccatcaccagcgactatgtcgtagtgggtaaagctccctcttcggagggagcatcaaag

SEQ ID NO: 2267 - RNA, 90 nt, synthetic construct
  misc_feature 1..90: note = gNA Variant Scaffold
  source 1..90: mol_type = other RNA
actggcgcttttattctgattactttgagagccatcaccagcgactatgtcgtagtgggtaaagctccctcttcggagggagcatcaaag

SEQ ID NO: 2268 - RNA, 88 nt, synthetic construct
  misc_feature 1..88: note = gNA Variant Scaffold
  source 1..88: mol_type = other RNA
acggcgcttttatctgattactttgagagccatcaccagcgactatgtcgtagtgggtaaagctccctcttcggagggagcatcaaag

SEQ ID NO: 2269 - RNA, 89 nt, synthetic construct
  misc_feature 1..89: note = gNA Variant Scaffold
  source 1..89: mol_type = other RNA
actggcgcttttatatgattactttgagagccatcaccagcgactatgtcgtagtgggtaaagctccctcttcggagggagcatcaaag

SEQ ID NO: 2270 - RNA, 90 nt, synthetic construct
  misc_feature 1..90: note = gNA Variant Scaffold
  source 1..90: mol_type = other RNA
actggcgcttttatcttgattactttgagagccatcaccagcgactatgtcgtagtgggtaaagctccctcttcggagggagcatcaaag

SEQ ID NO: 2271 - RNA, 89 nt, synthetic construct
  misc_feature 1..89: note = gNA Variant Scaffold
  source 1..89: mol_type = other RNA
actggcgcttttatctgattactttgagagccagcaccagcgactatgtcgtagtgggtaaagctccctcttcggagggagcatcaaag

SEQ ID NO: 2272 - RNA, 89 nt, synthetic construct
  misc_feature 1..89: note = gNA Variant Scaffold
  source 1..89: mol_type = other RNA
actggcgctgttatctgattacttcgagagccatcaccagcgactatgtcgtagtgggtaaagctccctcttcggagggagcatcgaag

SEQ ID NO: 2273 - RNA, 89 nt, synthetic construct
  misc_feature 1..89: note = gNA Variant Scaffold
  source 1..89: mol_type = other RNA
actggcgctcttatctgattacttcgagagccatcaccagcgactatgtcgtagtgggtaaagctccctcttcggagggagcatcgaag

SEQ ID NO: 2274 - RNA, 89 nt, synthetic construct
  misc_feature 1..89: note = gNA Variant Scaffold
  source 1..89: mol_type = other RNA
actggcgcttgtatctgattactctgagagccatcaccagcgactatgtcgtagtgggtaaagctccctcttcggagggagcatcagag

SEQ ID NO: 2275 - RNA, 89 nt, synthetic construct
  misc_feature 1..89: note = gNA Variant Scaffold
  source 1..89: mol_type = other RNA
actggcgcttctatctgattactctgagagccatcaccagcgactatgtcgtagtgggtaaagctccctcttcggagggagcatcagag

SEQ ID NO: 2276 - RNA, 89 nt, synthetic construct
  misc_feature 1..89: note = gNA Variant Scaffold
  source 1..89: mol_type = other RNA
actggcgctttgatctgattaccttgagagccatcaccagcgactatgtcgtagtgggtaaagctccctcttcggagggagcatcaagg

SEQ ID NO: 2277 - RNA, 89 nt, synthetic construct
  misc_feature 1..89: note = gNA Variant Scaffold
  source 1..89: mol_type = other RNA
actggcgctttcatctgattaccttgagagccatcaccagcgactatgtcgtagtgggtaaagctccctcttcggagggagcatcaagg

SEQ ID NO: 2278 - RNA, 89 nt, synthetic construct
  misc_feature 1..89: note = gNA Variant Scaffold
  source 1..89: mol_type = other RNA
actggcgctgttatctgattactttgagagccatcaccagcgactatgtcgtagtgggtaaagctccctcttcggagggagcatcaaag

SEQ ID NO: 2279 - RNA, 89 nt, synthetic construct
  misc_feature 1..89: note = gNA Variant Scaffold
  source 1..89: mol_type = other RNA
actggcgcttttatctgattactttgagagccatcaccagcgactatgtcgtagtgggtaaagctccctcttcggagggagcatcgaag

SEQ ID NO: 2280 - RNA, 89 nt, synthetic construct
  misc_feature 1..89: note = gNA Variant Scaffold
  source 1..89: mol_type = other RNA
actggcgcttttatctgattacttcgagagccatcaccagcgactatgtcgtagtgggtaaagctccctcttcggagggagcatcaaag

SEQ ID NO: 2281 - RNA, 20 nt, synthetic construct
  misc_feature 1..20: note = spacer sequence
  source 1..20: mol_type = other RNA
tctttttttttcaaactttt

SEQ ID NO: 2282 - RNA, 20 nt, synthetic construct
  misc_feature 1..20: note = spacer sequence
  source 1..20: mol_type = other RNA
ttttttttcaaacttttttg

SEQ ID NO: 2283 - RNA, 20 nt, synthetic construct
  misc_feature 1..20: note = spacer sequence
  source 1..20: mol_type = other RNA
aacttttttgtttttgatta

SEQ ID NO: 2284 - RNA, 20 nt, synthetic construct
  misc_feature 1..20: note = spacer sequence
  source 1..20: mol_type = other RNA
aaaacaaaaaagtttgaaaa

SEQ ID NO: 2285 - RNA, 20 nt, synthetic construct
  misc_feature 1..20: note = spacer sequence
  source 1..20: mol_type = other RNA
acagtacaaagctgtcatga

SEQ ID NO: 2286 - RNA, 20 nt, synthetic construct
  misc_feature 1..20: note = spacer sequence
  source 1..20: mol_type = other RNA
tgaataatatctgtacaatt

SEQ ID NO: 2287 - RNA, 20 nt, synthetic construct
  misc_feature 1..20: note = spacer sequence
  source 1..20: mol_type = other RNA
tgacagctttgtactgtgga

SEQ ID NO: 2288 - RNA, 20 nt, synthetic construct
  misc_feature 1..20: note = spacer sequence
  source 1..20: mol_type = other RNA
gtacaattgaacagtttcaa

SEQ ID NO: 2289 - RNA, 20 nt, synthetic construct
  misc_feature 1..20: note = spacer sequence
  source 1..20: mol_type = other RNA
attgtacagatattattcat

SEQ ID NO: 2290 - RNA, 20 nt, synthetic construct
  misc_feature 1..20: note = spacer sequence
  source 1..20: mol_type = other RNA
atagctgttcagacacaaat

SEQ ID NO: 2291 - RNA, 20 nt, synthetic construct
  misc_feature 1..20: note = spacer sequence
  source 1..20: mol_type = other RNA
gacacaaatttatttcaaac

SEQ ID NO: 2292 - RNA, 20 nt, synthetic construct
  misc_feature 1..20: note = spacer sequence
  source 1..20: mol_type = other RNA
gaacagctattgaaactgtt

SEQ ID NO: 2293 - RNA, 20 nt, synthetic construct
  misc_feature 1..20: note = spacer sequence
  source 1..20: mol_type = other RNA
aacaaataattggcaaacat

SEQ ID NO: 2294 - RNA, 20 nt, synthetic construct
  misc_feature 1..20: note = spacer sequence
  source 1..20: mol_type = other RNA
aacttgtagttaattatgtt

SEQ ID NO: 2295 - RNA, 20 nt, synthetic construct
  misc_feature 1..20: note = spacer sequence
  source 1..20: mol_type = other RNA
aattctaacttgtagttaat

SEQ ID NO: 2296 - RNA, 20 nt, synthetic construct
  misc_feature 1..20: note = spacer sequence
  source 1..20: mol_type = other RNA
cagtgctttaaaacattaat

SEQ ID NO: 2297 - RNA, 20 nt, synthetic construct
  misc_feature 1..20: note = spacer sequence
  source 1..20: mol_type = other RNA
attatggttagcaaaataaa

SEQ ID NO: 2298 - RNA, 20 nt, synthetic construct
  misc_feature 1..20: note = spacer sequence
  source 1..20: mol_type = other RNA
agagtatggctgggaattta

SEQ ID NO: 2299 - RNA, 20 nt, synthetic construct
  misc_feature 1..20: note = spacer sequence
  source 1..20: mol_type = other RNA
ggactttattttgctaacca

SEQ ID NO: 2300 - RNA, 20 nt, synthetic construct
  misc_feature 1..20: note = spacer sequence
  source 1..20: mol_type = other RNA
cagccatactctggacttta

SEQ ID NO: 2301 - RNA, 20 nt, synthetic construct
  misc_feature 1..20: note = spacer sequence
  source 1..20: mol_type = other RNA
cagaaagtcagaattccttg

SEQ ID NO: 2302 - RNA, 20 nt, synthetic construct
  misc_feature 1..20: note = spacer sequence
  source 1..20: mol_type = other RNA
gggattataatagtaaattc

SEQ ID NO: 2303 - RNA, 20 nt, synthetic construct
  misc_feature 1..20: note = spacer sequence
  source 1..20: mol_type = other RNA
gaattccttgggtgccaaag

SEQ ID NO: 2304 - RNA, 20 nt, synthetic construct
  misc_feature 1..20: note = spacer sequence
  source 1..20: mol_type = other RNA
gactttctgggattataata

SEQ ID NO: 2305 - RNA, 20 nt, synthetic construct
  misc_feature 1..20: note = spacer sequence
  source 1..20: mol_type = other RNA
ttgggtgccaaagtcccttg

SEQ ID NO: 2306 - RNA, 20 nt, synthetic construct
  misc_feature 1..20: note = spacer sequence
  source 1..20: mol_type = other RNA
cttgctataatttagtagga

SEQ ID NO: 2307 - RNA, 20 nt, synthetic construct
  misc_feature 1..20: note = spacer sequence
  source 1..20: mol_type = other RNA
tactaaattatagcaaggga

SEQ ID NO: 2308 - RNA, 20 nt, synthetic construct
  misc_feature 1..20: note = spacer sequence
  source 1..20: mol_type = other RNA
aaggttgtgtacatattcaa

SEQ ID NO: 2309 - RNA, 20 nt, synthetic construct
  misc_feature 1..20: note = spacer sequence
  source 1..20: mol_type = other RNA
aaggccatgatctcccaagg

SEQ ID NO: 2310 - RNA, 20 nt, synthetic construct
  misc_feature 1..20: note = spacer sequence
  source 1..20: mol_type = other RNA
tggcctttgaatatgtacac

SEQ ID NO: 2311 - RNA, 20 nt, synthetic construct
  misc_feature 1..20: note = spacer sequence
  source 1..20: mol_type = other RNA
cccaaggaacaagggggact

SEQ ID NO: 2312 - RNA, 20 nt, synthetic construct
  misc_feature 1..20: note = spacer sequence
  source 1..20: mol_type = other RNA
caaggaacaagggggacttc

SEQ ID NO: 2313 - RNA, 20 nt, synthetic construct
  misc_feature 1..20: note = spacer sequence
  source 1..20: mol_type = other RNA
ttgggagatcatggcctttg

SEQ ID NO: 2314 - RNA, 20 nt, synthetic construct
  misc_feature 1..20: note = spacer sequence
  source 1..20: mol_type = other RNA
cccttgttccttgggagatc

SEQ ID NO: 2315 - RNA, 20 nt, synthetic construct
  misc_feature 1..20: note = spacer sequence
  source 1..20: mol_type = other RNA
atattaaacaagcaaaaaca

SEQ ID NO: 2316 - RNA, 20 nt, synthetic construct
  misc_feature 1..20: note = spacer sequence
  source 1..20: mol_type = other RNA
attcattcattccgaattgt

SEQ ID NO: 2317 - RNA, 20 nt, synthetic construct
  misc_feature 1..20: note = spacer sequence
  source 1..20: mol_type = other RNA
ttcattccgaattgtctcct

SEQ ID NO: 2318 - RNA, 20 nt, synthetic construct
  misc_feature 1..20: note = spacer sequence
  source 1..20: mol_type = other RNA
ttccgaattgtctcctcctc

SEQ ID NO: 2319 - RNA, 20 nt, synthetic construct
  misc_feature 1..20: note = spacer sequence
  source 1..20: mol_type = other RNA
gaattgtctcctcctctgcc

SEQ ID NO: 2320 - RNA, 20 nt, synthetic construct
  misc_feature 1..20: note = spacer sequence
  source 1..20: mol_type = other RNA
gaatgaatgaatagattttt

SEQ ID NO: 2321 - RNA, 20 nt, synthetic construct
  misc_feature 1..20: note = spacer sequence
  source 1..20: mol_type = other RNA
cctcctctgcccctaccttc

SEQ ID NO: 2322 - RNA, 20 nt, synthetic construct
  misc_feature 1..20: note = spacer sequence
  source 1..20: mol_type = other RNA
tcctctgcccctaccttccc

SEQ ID NO: 2323 - RNA, 20 nt, synthetic construct
  misc_feature 1..20: note = spacer sequence
  source 1..20: mol_type = other RNA
tctgcccctaccttccccct

SEQ ID NO: 2324 - RNA, 20 nt, synthetic construct
  misc_feature 1..20: note = spacer sequence
  source 1..20: mol_type = other RNA
gcccctaccttccccctggg

SEQ ID NO: 2325 - RNA, 20 nt, synthetic construct
  misc_feature 1..20: note = spacer sequence
  source 1..20: mol_type = other RNA
ccctgggctttcctgagcag

SEQ ID NO: 2326 - RNA, 20 nt, synthetic construct
  misc_feature 1..20: note = spacer sequence
  source 1..20: mol_type = other RNA
tgagcagtttgatattgaag

SEQ ID NO: 2327 - RNA, 20 nt, synthetic construct
  misc_feature 1..20: note = spacer sequence
  source 1..20: mol_type = other RNA
ggaaagcccagggggaaggt

SEQ ID NO: 2328 - RNA, 20 nt, synthetic construct
  misc_feature 1..20: note = spacer sequence
  source 1..20: mol_type = other RNA
aactgctcaggaaagcccag

SEQ ID NO: 2329 - RNA, 20 nt, synthetic construct
  misc_feature 1..20: note = spacer sequence
  source 1..20: mol_type = other RNA
atatcaaactgctcaggaaa

SEQ ID NO: 2330 - RNA, 20 nt, synthetic construct
  misc_feature 1..20: note = spacer sequence
  source 1..20: mol_type = other RNA
tacaacttcaatatcaaact

SEQ ID NO: 2331 - RNA, 20 nt, synthetic construct
  misc_feature 1..20: note = spacer sequence
  source 1..20: mol_type = other RNA
tcctacaacttcaatatcaa

SEQ ID NO: 2332 - RNA, 20 nt, synthetic construct
  misc_feature 1..20: note = spacer sequence
  source 1..20: mol_type = other RNA
tttcgtcctacaacttcaat

SEQ ID NO: 2333 - RNA, 20 nt, synthetic construct
  misc_feature 1..20: note = spacer sequence
  source 1..20: mol_type = other RNA
aaactaaatcactttcacaa

SEQ ID NO: 2334 - RNA, 20 nt, synthetic construct
  misc_feature 1..20: note = spacer sequence
  source 1..20: mol_type = other RNA
ctttcacaaccaccatcaag

SEQ ID NO: 2335 - RNA, 20 nt, synthetic construct
  misc_feature 1..20: note = spacer sequence
  source 1..20: mol_type = other RNA
caaccaccatcaagcttaca

SEQ ID NO: 2336 - RNA, 20 nt, synthetic construct
  misc_feature 1..20: note = spacer sequence
  source 1..20: mol_type = other RNA
agcttacaacatctgcctta

SEQ ID NO: 2337 - RNA, 20 nt, synthetic construct
  misc_feature 1..20: note = spacer sequence
  source 1..20: mol_type = other RNA
gccttatgaatggaggttta

SEQ ID NO: 2338 - RNA, 20 nt, synthetic construct
  misc_feature 1..20: note = spacer sequence
  source 1..20: mol_type = other RNA
taaggcagatgttgtaagct

SEQ ID NO: 2339 - RNA, 20 nt, synthetic construct
  misc_feature 1..20: note = spacer sequence
  source 1..20: mol_type = other RNA
attcataaggcagatgttgt

SEQ ID NO: 2340 - RNA, 20 nt, synthetic construct
  misc_feature 1..20: note = spacer sequence
  source 1..20: mol_type = other RNA
aagcgtaaacaataaacctc

SEQ ID NO: 2341 - RNA, 20 nt, synthetic construct
  misc_feature 1..20: note = spacer sequence
  source 1..20: mol_type = other RNA
caaagcgtaaacaataaacc

SEQ ID NO: 2342 - RNA, 20 nt, synthetic construct
  misc_feature 1..20: note = spacer sequence
  source 1..20: mol_type = other RNA
acttctcaaaaacataaatt

SEQ ID NO: 2343 - RNA, 20 nt, synthetic construct
  misc_feature 1..20: note = spacer sequence
  source 1..20: mol_type = other RNA
caaaaacataaattagtaac

SEQ ID NO: 2344 - RNA, 20 nt, synthetic construct
  misc_feature 1..20: note = spacer sequence
  source 1..20: mol_type = other RNA
aaaacataaattagtaacat

SEQ ID NO: 2345 - RNA, 20 nt, synthetic construct
  misc_feature 1..20: note = spacer sequence
  source 1..20: mol_type = other RNA
catgttactaatttatgttt

SEQ ID NO: 2346 - RNA, 20 nt, synthetic construct
  misc_feature 1..20: note = spacer sequence
  source 1..20: mol_type = other RNA
ttcccatgttactaatttat

SEQ ID NO: 2347 - RNA, 20 nt, synthetic construct
  misc_feature 1..20: note = spacer sequence
  source 1..20: mol_type = other RNA
ttccttcccatgttactaat

SEQ ID NO: 2348 - RNA, 20 nt, synthetic construct
  misc_feature 1..20: note = spacer sequence
  source 1..20: mol_type = other RNA
taaaaaaaatccttccttcc

SEQ ID NO: 2349 - RNA, 20 nt, synthetic construct
  misc_feature 1..20: note = spacer sequence
  source 1..20: mol_type = other RNA
ataaatcacatacacacaca

SEQ ID NO: 2350 - RNA, 20 nt, synthetic construct
  misc_feature 1..20: note = spacer sequence
  source 1..20: mol_type = other RNA
agttggctttgcttttttag

SEQ ID NO: 2351 - RNA, 20 nt, synthetic construct
  misc_feature 1..20: note = spacer sequence
  source 1..20: mol_type = other RNA
catacacacacattgatccc

SEQ ID NO: 2352 - RNA, 20 nt, synthetic construct
  misc_feature 1..20: note = spacer sequence
  source 1..20: mol_type = other RNA
atgtgtgtgtatgtgattta

SEQ ID NO: 2353 - RNA, 20 nt, synthetic construct
  misc_feature 1..20: note = spacer sequence
  source 1..20: mol_type = other RNA
ccacaccgttctcaatgcaa

SEQ ID NO: 2354 - RNA, 20 nt, synthetic construct
  misc_feature 1..20: note = spacer sequence
  source 1..20: mol_type = other RNA
caatgcaaaggacaaatcgg

SEQ ID NO: 2355 - RNA, 20 nt, synthetic construct
  misc_feature 1..20: note = spacer sequence
  source 1..20: mol_type = other RNA
atgcaaaggacaaatcggag

SEQ ID NO: 2356 - RNA, 20 nt, synthetic construct
  misc_feature 1..20: note = spacer sequence
  source 1..20: mol_type = other RNA
tttgcattgagaacggtgtg

SEQ ID NO: 2357 - RNA, 20 nt, synthetic construct
  misc_feature 1..20: note = spacer sequence
  source 1..20: mol_type = other RNA
gagcccaaggaccttccctt

SEQ ID NO: 2358 - RNA, 20 nt, synthetic construct
  misc_feature 1..20: note = spacer sequence
  source 1..20: mol_type = other RNA
gatttgtcctttgcattgag

SEQ ID NO: 2359 - RNA, 20 nt, synthetic construct
  misc_feature 1..20: note = spacer sequence
  source 1..20: mol_type = other RNA
ttgggctccgatttgtcctt

SEQ ID NO: 2360 - RNA, 20 nt, synthetic construct
  misc_feature 1..20: note = spacer sequence
  source 1..20: mol_type = other RNA
ctttagtagtagagcatgct

SEQ ID NO: 2361 - RNA, 20 nt, synthetic construct
  misc_feature 1..20: note = spacer sequence
  source 1..20: mol_type = other RNA
actactaaagggaaggtcct

SEQ ID NO: 2362 - RNA, 20 nt, synthetic construct
  misc_feature 1..20: note = spacer sequence
  source 1..20: mol_type = other RNA
acaggaagaggtttaattta

SEQ ID NO: 2363 - RNA, 20 nt, synthetic construct
  misc_feature 1..20: note = spacer sequence
  source 1..20: mol_type = other RNA
tgtggaagcatgctctacta

SEQ ID NO: 2364 - RNA, 20 nt, synthetic construct
  misc_feature 1..20: note = spacer sequence
  source 1..20: mol_type = other RNA
tcctgtggaagcatgctcta

SEQ ID NO: 2365 - RNA, 20 nt, synthetic construct
  misc_feature 1..20: note = spacer sequence
  source 1..20: mol_type = other RNA
tataaattaaacctcttcct

SEQ ID NO: 2366 - RNA, 20 nt, synthetic construct
  misc_feature 1..20: note = spacer sequence
  source 1..20: mol_type = other RNA
tttaaaatgctattgatggc

SEQ ID NO: 2367 - RNA, 20 nt, synthetic construct
  misc_feature 1..20: note = spacer sequence
  source 1..20: mol_type = other RNA
atagcattttaaaggaccaa

SEQ ID NO: 2368 - RNA, 20 nt, synthetic construct
  misc_feature 1..20: note = spacer sequence
  source 1..20: mol_type = other RNA
caaagtaatcccagcacttt

SEQ ID NO: 2369 - RNA, 20 nt, synthetic construct
  misc_feature 1..20: note = spacer sequence
  source 1..20: mol_type = other RNA
cagcactttgggagcctgag

SEQ ID NO: 2370 - RNA, 20 nt, synthetic construct
  misc_feature 1..20: note = spacer sequence
  source 1..20: mol_type = other RNA
caaagtgctgggattacttt

SEQ ID NO: 2371 - RNA, 20 nt, synthetic construct
  misc_feature 1..20: note = spacer sequence
  source 1..20: mol_type = other RNA
ggctcccaaagtgctgggat

SEQ ID NO: 2372 - RNA, 20 nt, synthetic construct
  misc_feature 1..20: note = spacer sequence
  source 1..20: mol_type = other RNA
gcctgcctcaggctcccaaa

SEQ ID NO: 2373 - RNA, 20 nt, synthetic construct
  misc_feature 1..20: note = spacer sequence
  source 1..20: mol_type = other RNA
caaggtctggagttcgagac

SEQ ID NO: 2374 - RNA, 20 nt, synthetic construct
  misc_feature 1..20: note = spacer sequence
  source 1..20: mol_type = other RNA
ggagttcgagaccagttcgg

SEQ ID NO: 2375 - RNA, 20 nt, synthetic construct
  misc_feature 1..20: note = spacer sequence
  source 1..20: mol_type = other RNA
agaccttgtgatccgcctgc

SEQ ID NO: 2376 - RNA, 20 nt, synthetic construct
  misc_feature 1..20: note = spacer sequence
  source 1..20: mol_type = other RNA
agaccagttcggtcaatata

SEQ ID NO: 2377 - RNA, 20 nt, synthetic construct
  misc_feature 1..20: note = spacer sequence
  source 1..20: mol_type = other RNA
aactccagaccttgtgatcc

SEQ ID NO: 2378 - RNA, 20 nt, synthetic construct
  misc_feature 1..20: note = spacer sequence
  source 1..20: mol_type = other RNA
cgaactccagaccttgtgat

SEQ ID NO: 2379 - RNA, 20 nt, synthetic construct
  misc_feature 1..20: note = spacer sequence
  source 1..20: mol_type = other RNA
gtcaatatagtgaaaccccg

SEQ ID NO: 2380 - RNA, 20 nt, synthetic construct
  misc_feature 1..20: note = spacer sequence
  source 1..20: mol_type = other RNA
atatagtgaaaccccgtctc

SEQ ID NO: 2381 - RNA, 20 nt, synthetic construct
  misc_feature 1..20: note = spacer sequence
  source 1..20: mol_type = other RNA
ctatattgaccgaactggtc

SEQ ID NO: 2382 - RNA, 20 nt, synthetic construct
  misc_feature 1..20: note = spacer sequence
  source 1..20: mol_type = other RNA
ctattaaaaatgcaaaaatt

SEQ ID NO: 2383 - RNA, 20 nt, synthetic construct
  misc_feature 1..20: note = spacer sequence
  source 1..20: mol_type = other RNA
attaaaaatgcaaaaattag

SEQ ID NO: 2384 - RNA, 20 nt, synthetic construct
  misc_feature 1..20: note = spacer sequence
  source 1..20: mol_type = other RNA
cagctacttgggaggctgag

SEQ ID NO: 2385 - RNA, 20 nt, synthetic construct
  misc_feature 1..20: note = spacer sequence
  source 1..20: mol_type = other RNA
caagtagctgggactacagg

SEQ ID NO: 2386 - RNA, 20 nt, synthetic construct
  misc_feature 1..20: note = spacer sequence
  source 1..20: mol_type = other RNA
gcctcccaagtagctgggac

SEQ ID NO: 2387 - RNA, 20 nt, synthetic construct
  misc_feature 1..20: note = spacer sequence
  source 1..20: mol_type = other RNA
tgcctcagcctcccaagtag

SEQ ID NO: 2388 - RNA, 20 nt, synthetic construct
  misc_feature 1..20: note = spacer sequence
  source 1..20: mol_type = other RNA
cctgcctcagcctcccaagt

SEQ ID NO: 2389 - RNA, 20 nt, synthetic construct
  misc_feature 1..20: note = spacer sequence
  source 1..20: mol_type = other RNA
cttgaacctggaggtgagga

SEQ ID NO: 2390 - RNA, 20 nt, synthetic construct
  misc_feature 1..20: note = spacer sequence
  source 1..20: mol_type = other RNA
agtgattctcctgcctcagc

SEQ ID NO: 2391 - RNA, 20 nt, synthetic construct
  misc_feature 1..20: note = spacer sequence
  source 1..20: mol_type = other RNA
aggttcaagtgattctcctg

SEQ ID NO: 2392 - RNA, 20 nt, synthetic construct
  misc_feature 1..20: note = spacer sequence
  source 1..20: mol_type = other RNA
cctccaggttcaagtgattc

SEQ ID NO: 2393 - RNA, 20 nt, synthetic construct
  misc_feature 1..20: note = spacer sequence
  source 1..20: mol_type = other RNA
tcacctccaggttcaagtga

SEQ ID NO: 2394 - RNA, 20 nt, synthetic construct
  misc_feature 1..20: note = spacer sequence
  source 1..20: mol_type = other RNA
ctgcaacctcctcacctcca

SEQ ID NO: 2395 - RNA, 20 nt, synthetic construct
  misc_feature 1..20: note = spacer sequence
  source 1..20: mol_type = other RNA
gagattgcgccactgcactc

SEQ ID NO: 2396 - RNA, 20 nt, synthetic construct
  misc_feature 1..20: note = spacer sequence
  source 1..20: mol_type = other RNA
gatcgctgcaacctcctcac

SEQ ID NO: 2397 - RNA, 20 nt, synthetic construct
  misc_feature 1..20: note = spacer sequence
  source 1..20: mol_type = other RNA
cagatcgctgcaacctcctc

SEQ ID NO: 2398 - RNA, 20 nt, synthetic construct
  misc_feature 1..20: note = spacer sequence
  source 1..20: mol_type = other RNA
agcccgggctacaatgcgag

SEQ ID NO: 2399 - RNA, 20 nt, synthetic construct
  misc_feature 1..20: note = spacer sequence
  source 1..20: mol_type = other RNA
cattgtagcccgggctggag

SEQ ID NO: 2400 - RNA, 20 nt, synthetic construct
  misc_feature 1..20: note = spacer sequence
  source 1..20: mol_type = other RNA
cgcattgtagcccgggctgg

SEQ ID NO: 2401 - RNA, 20 nt, synthetic construct
  misc_feature 1..20: note = spacer sequence
  source 1..20: mol_type = other RNA
gtctcaaaaaaaaaaaaaag

SEQ ID NO: 2402 - RNA, 20 nt, synthetic construct
  misc_feature 1..20: note = spacer sequence
  source 1..20: mol_type = other RNA
caaaaaaaaaaaaaagttat

SEQ ID NO: 2403 - RNA, 20 nt, synthetic construct
  misc_feature 1..20: note = spacer sequence
  source 1..20: mol_type = other RNA
aaaaaaaaaaaaagttattg

SEQ ID NO: 2404 - RNA, 20 nt, synthetic construct
  misc_feature 1..20: note = spacer sequence
  source 1..20: mol_type = other RNA
ataacttttttttttttttg

SEQ ID NO: 2405 - RNA, 20 nt, synthetic construct
  misc_feature 1..20: note = spacer sequence
  source 1..20: mol_type = other RNA
ttgatctttggaaacaacgg

SEQ ID NO: 2406 - RNA, 20 nt, synthetic construct
  misc_feature 1..20: note = spacer sequence
  source 1..20: mol_type = other RNA
aggaatgtcaataacttttt

SEQ ID NO: 2407 - RNA, 20 nt, synthetic construct
  misc_feature 1..20: note = spacer sequence
  source 1..20: mol_type = other RNA
ttggaaacaacggcaaaggg

SEQ ID NO: 2408 - RNA, 20 nt, synthetic construct
  misc_feature 1..20: note = spacer sequence
  source 1..20: mol_type = other RNA
aaagatcaaggaatgtcaat

SEQ ID NO: 2409 - RNA, 20 nt, synthetic construct
  misc_feature 1..20: note = spacer sequence
  source 1..20: mol_type = other RNA
aacctaatattgaataaggg

SEQ ID NO: 2410 - RNA, 20 nt, synthetic construct
  misc_feature 1..20: note = spacer sequence
  source 1..20: mol_type = other RNA
atattaggtttgatttgccc

SEQ ID NO: 2411 - RNA, 20 nt, synthetic construct
  misc_feature 1..20: note = spacer sequence
  source 1..20: mol_type = other RNA
cttattcaatattaggtttg

SEQ ID NO: 2412 - RNA, 20 nt, synthetic construct
  misc_feature 1..20: note = spacer sequence
  source 1..20: mol_type = other RNA
cccttattcaatattaggtt

SEQ ID NO: 2413 - RNA, 20 nt, synthetic construct
  misc_feature 1..20: note = spacer sequence
  source 1..20: mol_type = other RNA
ttctcccttattcaatatta

SEQ ID NO: 2414 - RNA, 20 nt, synthetic construct
  misc_feature 1..20: note = spacer sequence
  source 1..20: mol_type = other RNA
agttggcactccttctccct

SEQ ID NO: 2415 - RNA, 20 nt, synthetic construct
  misc_feature 1..20: note = spacer sequence
  source 1..20: mol_type = other RNA
tttccatgcactgtcagggt

SEQ ID NO: 2416 - RNA, 20 nt, synthetic construct
  misc_feature 1..20: note = spacer sequence
  source 1..20: mol_type = other RNA
atgcactgtcagggtgatag

SEQ ID NO: 2417 - RNA, 20 nt, synthetic construct
  misc_feature 1..20: note = spacer sequence
  source 1..20: mol_type = other RNA
gggtgatagtgccagatgcc

SEQ ID NO: 2418 - RNA, 20 nt, synthetic construct
  misc_feature 1..20: note = spacer sequence
  source 1..20: mol_type = other RNA
ccctgacagtgcatggaaag

SEQ ID NO: 2419 - RNA, 20 nt, synthetic construct
  misc_feature 1..20: note = spacer sequence
  source 1..20: mol_type = other RNA
ggcactatcaccctgacagt

SEQ ID NO: 2420 - RNA, 20 nt, synthetic construct
  misc_feature 1..20: note = spacer sequence
  source 1..20: mol_type = other RNA
tttccatgcaccatcaggga

SEQ ID NO: 2421 - RNA, 20 nt, synthetic construct
  misc_feature 1..20: note = spacer sequence
  source 1..20: mol_type = other RNA
atgcaccatcagggagacag

SEQ ID NO: 2422 - RNA, 20 nt, synthetic construct
  misc_feature 1..20: note = spacer sequence
  source 1..20: mol_type = other RNA
gggagacagtgccatttaca

SEQ ID NO: 2423 - RNA, 20 nt, synthetic construct
  misc_feature 1..20: note = spacer sequence
  source 1..20: mol_type = other RNA
ctgatggtgcatggaaagga

SEQ ID NO: 2424 - RNA, 20 nt, synthetic construct
  misc_feature 1..20: note = spacer sequence
  source 1..20: mol_type = other RNA
ccctgatggtgcatggaaag

SEQ ID NO: 2425 - RNA, 20 nt, synthetic construct
  misc_feature 1..20: note = spacer sequence
  source 1..20: mol_type = other RNA
ggagtactcgggagctttga

SEQ ID NO: 2426 - RNA, 20 nt, synthetic construct
  misc_feature 1..20: note = spacer sequence
  source 1..20: mol_type = other RNA
cgagtacacagcccaaatgt

SEQ ID NO: 2427 - RNA, 20 nt, synthetic construct
  misc_feature 1..20: note = spacer sequence
  source 1..20: mol_type = other RNA
ggagctttgagaacctgctg

SEQ ID NO: 2428 - RNA, 20 nt, synthetic construct
  misc_feature 1..20: note = spacer sequence
  source 1..20: mol_type = other RNA
cgagtactcccgagtacaca

SEQ ID NO: 2429 - RNA, 20 nt, synthetic construct
  misc_feature 1..20: note = spacer sequence
  source 1..20: mol_type = other RNA
aagctcccgagtactcccga

SEQ ID NO: 2430 - RNA, 20 nt, synthetic construct
  misc_feature 1..20: note = spacer sequence
  source 1..20: mol_type = other RNA
caaagctcccgagtactccc

SEQ ID NO: 2431 - RNA, 20 nt, synthetic construct
  misc_feature 1..20: note = spacer sequence
  source 1..20: mol_type = other RNA
gcaggttctcaaagctcccg

SEQ ID NO: 2432 - RNA, 20 nt, synthetic construct
  misc_feature 1..20: note = spacer sequence
  source 1..20: mol_type = other RNA
cgtgctgctgcggcctcagc

SEQ ID NO: 2433 - RNA, 20 nt, synthetic construct
  misc_feature 1..20: note = spacer sequence
  source 1..20: mol_type = other RNA
ggtgtcacgtgctgctgcgg

SEQ ID NO: 2434 - RNA, 20 nt, synthetic construct
  misc_feature 1..20: note = spacer sequence
  source 1..20: mol_type = other RNA
ctggtgtcacgtgctgctgc

SEQ ID NO: 2435 - RNA, 20 nt, synthetic construct
  misc_feature 1..20: note = spacer sequence
  source 1..20: mol_type = other RNA
tctctggtgtcacgtgctgc

SEQ ID NO: 2436 - RNA, 20 nt, synthetic construct
  misc_feature 1..20: note = spacer sequence
  source 1..20: mol_type = other RNA
caccccagtcatctctggtg

SEQ ID NO: 2437 - RNA, 20 nt, synthetic construct
  misc_feature 1..20: note = spacer sequence
  source 1..20: mol_type = other RNA
tggacttgaggctttacacc

SEQ ID NO: 2438 - RNA, 20 nt, synthetic construct
  misc_feature 1..20: note = spacer sequence
  source 1..20: mol_type = other RNA
atgaatcccaccccagtcat

SEQ ID NO: 2439 - RNA, 20 nt, synthetic construct
  misc_feature 1..20: note = spacer sequence
  source 1..20: mol_type = other RNA
agtccatgaatcccacccca

SEQ ID NO: 2440 - RNA, 20 nt, synthetic construct
  misc_feature 1..20: note = spacer sequence
  source 1..20: mol_type = other RNA
taagtggtgtaaagcctcaa

SEQ ID NO: 2441 - RNA, 20 nt, synthetic construct
  misc_feature 1..20: note = spacer sequence
  source 1..20: mol_type = other RNA
cctcagcatggacctctgaa

SEQ ID NO: 2442 - RNA, 20 nt, synthetic construct
  misc_feature 1..20: note = spacer sequence
  source 1..20: mol_type = other RNA
gcatggacctctgaaccagc

SEQ ID NO: 2443 - RNA, 20 nt, synthetic construct
  misc_feature 1..20: note = spacer sequence
  source 1..20: mol_type = other RNA
atgctgaggggagggcactc

SEQ ID NO: 2444 - RNA, 20 nt, synthetic construct
  misc_feature 1..20: note = spacer sequence
  source 1..20: mol_type = other RNA
gaaccagcctgacctgacct

SEQ ID NO: 2445 - RNA, 20 nt, synthetic construct
  misc_feature 1..20: note = spacer sequence
  source 1..20: mol_type = other RNA
gaggtccatgctgaggggag

SEQ ID NO: 2446 - RNA, 20 nt, synthetic construct
  misc_feature 1..20: note = spacer sequence
  source 1..20: mol_type = other RNA
ggctggttcagaggtccatg

SEQ ID NO: 2447 - RNA, 20 nt, synthetic construct
  misc_feature 1..20: note = spacer sequence
  source 1..20: mol_type = other RNA
ggtcaggctggttcagaggt

SEQ ID NO: 2448 - RNA, 20 nt, synthetic construct
  misc_feature 1..20: note = spacer sequence
  source 1..20: mol_type = other RNA
aacacaccagcgggccctgc

SEQ ID NO: 2449 - RNA, 20 nt, synthetic construct
  misc_feature 1..20: note = spacer sequence
  source 1..20: mol_type = other RNA
ggcagggcccgctggtgtgt

SEQ ID NO: 2450 - RNA, 20 nt, synthetic construct
  misc_feature 1..20: note = spacer sequence
  source 1..20: mol_type = other RNA
ttgccaaggttctggcaggg

SEQ ID NO: 2451 - RNA, 20 nt, synthetic construct
  misc_feature 1..20: note = spacer sequence
  source 1..20: mol_type = other RNA
tgtccttgccaaggttctgg

SEQ ID NO: 2452 - RNA, 20 nt, synthetic construct
  misc_feature 1..20: note = spacer sequence
  source 1..20: mol_type = other RNA
tgcatcctgtccttgccaag

SEQ ID NO: 2453 - RNA, 20 nt, synthetic construct
  misc_feature 1..20: note = spacer sequence
  source 1..20: mol_type = other RNA
agagccaggacagcccgtca

SEQ ID NO: 2454 - RNA, 20 nt, synthetic construct
  misc_feature 1..20: note = spacer sequence
  source 1..20: mol_type = other RNA
ggaattcatgcatcctgtcc

SEQ ID NO: 2455 - RNA, 20 nt, synthetic construct
  misc_feature 1..20: note = spacer sequence
  source 1..20: mol_type = other RNA
tggctctggaattcatgcat

SEQ ID NO: 2456 - RNA, 20 nt, synthetic construct
  misc_feature 1..20: note = spacer sequence
  source 1..20: mol_type = other RNA
atagggccttattatttccc

SEQ ID NO: 2457 - RNA, 20 nt, synthetic construct
  misc_feature 1..20: note = spacer sequence
  source 1..20: mol_type = other RNA
ccttcccagggccacaactg

SEQ ID NO: 2458 - RNA, 20 nt, synthetic construct
  misc_feature 1..20: note = spacer sequence
  source 1..20: mol_type = other RNA
cagggccacaactgcacaga

SEQ ID NO: 2459 - RNA, 20 nt, synthetic construct
  misc_feature 1..20: note = spacer sequence
  source 1..20: mol_type = other RNA
gtgcagttgtggccctggga

SEQ ID NO: 2460 - RNA, 20 nt, synthetic construct
  misc_feature 1..20: note = spacer sequence
  source 1..20: mol_type = other RNA
ttattctgtgcagttgtggc

SEQ ID NO: 2461 - RNA, 20 nt, synthetic construct
  misc_feature 1..20: note = spacer sequence
  source 1..20: mol_type = other RNA
aaaatcattattctgtgcag

SEQ ID NO: 2462 - RNA, 20 nt, synthetic construct
  misc_feature 1..20: note = spacer sequence
  source 1..20: mol_type = other RNA
ctgtcaaaaatcattattct

SEQ ID NO: 2463 - RNA, 20 nt, synthetic construct
  misc_feature 1..20: note = spacer sequence
  source 1..20: mol_type = other RNA
tttggcttcactgtcaaaaa

SEQ ID NO: 2464 - RNA, 20 nt, synthetic construct
  misc_feature 1..20: note = spacer sequence
  source 1..20: mol_type = other RNA
cgtagtattcatttggcttc

SEQ ID NO: 2465 - RNA, 20 nt, synthetic construct
  misc_feature 1..20: note = spacer sequence
  source 1..20: mol_type = other RNA
cttcccgtagtattcatttg

SEQ ID NO: 2466 - RNA, 20 nt, synthetic construct
  misc_feature 1..20: note = spacer sequence
  source 1..20: mol_type = other RNA
ggagtacttatgagaaaaag

SEQ ID NO: 2467 - RNA, 20 nt, synthetic construct
  misc_feature 1..20: note = spacer sequence
  source 1..20: mol_type = other RNA
tgagtactagtggtcacttc

SEQ ID NO: 2468 - RNA, 20 nt, synthetic construct
  misc_feature 1..20: note = spacer sequence
  source 1..20: mol_type = other RNA
taagtactcctgagtactag

SEQ ID NO: 2469 - RNA, 20 nt, synthetic construct
  misc_feature 1..20: note = spacer sequence
  source 1..20: mol_type = other RNA
cataagtactcctgagtact

SEQ ID NO: 2470 - RNA, 20 nt, synthetic construct
  misc_feature 1..20: note = spacer sequence
  source 1..20: mol_type = other RNA
ttttctcataagtactcctg

SEQ ID NO: 2471 - RNA, 20 nt, synthetic construct
  misc_feature 1..20: note = spacer sequence
  source 1..20: mol_type = other RNA
tattctttttctcataagta

SEQ ID NO: 2472 - RNA, 20 nt, synthetic construct
  misc_feature 1..20: note = spacer sequence
  source 1..20: mol_type = other RNA
ctattgtataatatatactg

SEQ ID NO: 2473 - RNA, 20 nt, synthetic construct
  misc_feature 1..20: note = spacer sequence
  source 1..20: mol_type = other RNA
attgtataatatatactgta

SEQ ID NO: 2474 - RNA, 20 nt, synthetic construct
  misc_feature 1..20: note = spacer sequence
  source 1..20: mol_type = other RNA
tgttcaactttagaaattac

SEQ ID NO: 2475 - RNA, 20 nt, synthetic construct
  misc_feature 1..20: note = spacer sequence
  source 1..20: mol_type = other RNA
actttagaaattacatttta

SEQ ID NO: 2476 - RNA, 20 nt, synthetic construct
  misc_feature 1..20: note = spacer sequence
  source 1..20: mol_type = other RNA
aaagttgaacatgaatgttt

SEQ ID NO: 2477 - RNA, 20 nt, synthetic construct
  misc_feature 1..20: note = spacer sequence
  source 1..20: mol_type = other RNA
tgttttaaaatgtaatttct

SEQ ID NO: 2478 - RNA, 20 nt, synthetic construct
  misc_feature 1..20: note = spacer sequence
  source 1..20: mol_type = other RNA
ccttaaaaacacacacaaac

SEQ ID NO: 2479 - RNA, 20 nt, synthetic construct
  misc_feature 1..20: note = spacer sequence
  source 1..20: mol_type = other RNA
ttaaaaacacacacaaacca

SEQ ID NO: 2480 - RNA, 20 nt, synthetic construct
  misc_feature 1..20: note = spacer sequence
  source 1..20: mol_type = other RNA
ttgtgtgtgtggtttgtgtg

SEQ ID NO: 2481 - RNA, 20 nt, synthetic construct
  misc_feature 1..20: note = spacer sequence
  source 1..20: mol_type = other RNA
tacagtgtttttattttgtt

SEQ ID NO: 2482 - RNA, 20 nt, synthetic construct
  misc_feature 1..20: note = spacer sequence
  source 1..20: mol_type = other RNA
tgcagtattcctacagtgtt

SEQ ID NO: 2483 - RNA, 20 nt, synthetic construct
  misc_feature 1..20: note = spacer sequence
  source 1..20: mol_type = other RNA
aggtaatccacatcaaccct

SEQ ID NO: 2484 - RNA, 20 nt, synthetic construct
  misc_feature 1..20: note = spacer sequence
  source 1..20: mol_type = other RNA
acatcaaccctggtatcagg

SEQ ID NO: 2485 - RNA, 20 nt, synthetic construct
  misc_feature 1..20: note = spacer sequence
  source 1..20: mol_type = other RNA
accctggtatcaggttcttg

SEQ ID NO: 2486 - RNA, 20 nt, synthetic construct
  misc_feature 1..20: note = spacer sequence
  source 1..20: mol_type = other RNA
ggttcttgagtccagtccat

SEQ ID NO: 2487 - RNA, 20 nt, synthetic construct
  misc_feature 1..20: note = spacer sequence
  source 1..20: mol_type = other RNA
tgagtccagtccatggctaa

SEQ ID NO: 2488 - RNA, 20 nt, synthetic construct
  misc_feature 1..20: note = spacer sequence
  source 1..20: mol_type = other RNA
agaacctgataccagggttg

SEQ ID NO: 2489 - RNA, 20 nt, synthetic construct
  misc_feature 1..20: note = spacer sequence
  source 1..20: mol_type = other RNA
agtccatggctaagcgcgaa

SEQ ID NO: 2490 - RNA, 20 nt, synthetic construct
  misc_feature 1..20: note = spacer sequence
  source 1..20: mol_type = other RNA
atggctaagcgcgaacacac

SEQ ID NO: 2491 - RNA, 20 nt, synthetic construct
  misc_feature 1..20: note = spacer sequence
  source 1..20: mol_type = other RNA
cgcttagccatggactggac

SEQ ID NO: 2492 - RNA, 20 nt, synthetic construct
  misc_feature 1..20: note = spacer sequence
  source 1..20: mol_type = other RNA
gtattagtgtctcaagtgca

SEQ ID NO: 2493 - RNA, 20 nt, synthetic construct
  misc_feature 1..20: note = spacer sequence
  source 1..20: mol_type = other RNA
caagtgcagggggccctgac

SEQ ID NO: 2494 - RNA, 20 nt, synthetic construct
  misc_feature 1..20: note = spacer sequence
  source 1..20: mol_type = other RNA
agtgcagggggccctgaccc

SEQ ID NO: 2495 - RNA, 20 nt, synthetic construct
  misc_feature 1..20: note = spacer sequence
  source 1..20: mol_type = other RNA
gggccccctgcacttgagac

SEQ ID NO: 2496 - RNA, 20 nt, synthetic construct
  misc_feature 1..20: note = spacer sequence
  source 1..20: mol_type = other RNA
aagttgctggggtcagggcc

SEQ ID NO: 2497 - RNA, 20 nt, synthetic construct
  misc_feature 1..20: note = spacer sequence
  source 1..20: mol_type = other RNA
acatgtgaatacagtatttt

SEQ ID NO: 2498 - RNA, 20 nt, synthetic construct
  misc_feature 1..20: note = spacer sequence
  source 1..20: mol_type = other RNA
catgtagatataatgtacat

SEQ ID NO: 2499 - RNA, 20 nt, synthetic construct
  misc_feature 1..20: note = spacer sequence
  source 1..20: mol_type = other RNA
taatttaaaatactgtattc

SEQ ID NO: 2500 - RNA, 20 nt, synthetic construct
  misc_feature 1..20: note = spacer sequence
  source 1..20: mol_type = other RNA
accaaatatcaggagatggt

SEQ ID NO: 2501 - RNA, 20 nt, synthetic construct
  misc_feature 1..20: note = spacer sequence
  source 1..20: mol_type = other RNA
ggagatggttgcggttcaga

SEQ ID NO: 2502 - RNA, 20 nt, synthetic construct
  misc_feature 1..20: note = spacer sequence
  source 1..20: mol_type = other RNA
tgatatttggtagagtaaca

SEQ ID NO: 2503 - RNA, 20 nt, synthetic construct
  misc_feature 1..20: note = spacer sequence
  source 1..20: mol_type = other RNA
cctgatatttggtagagtaa

SEQ ID NO: 2504 - RNA, 20 nt, synthetic construct
  misc_feature 1..20: note = spacer sequence
  source 1..20: mol_type = other RNA
gagaacagttaataaaaggg

SEQ ID NO: 2505 - RNA, 20 nt, synthetic construct
  misc_feature 1..20: note = spacer sequence
  source 1..20: mol_type = other RNA
gaaccgcaaccatctcctga

SEQ ID NO: 2506 - RNA, 20 nt, synthetic construct
  misc_feature 1..20: note = spacer sequence
  source 1..20: mol_type = other RNA
ctgaaccgcaaccatctcct

SEQ ID NO: 2507 - RNA, 20 nt, synthetic construct
  misc_feature 1..20: note = spacer sequence
  source 1..20: mol_type = other RNA
gcacatgtattccagaactt

SEQ ID NO: 2508 - RNA, 20 nt, synthetic construct
  misc_feature 1..20: note = spacer sequence
  source 1..20: mol_type = other RNA
agaacttaaaatataattta

SEQ ID NO: 2509 - RNA, 20 nt, synthetic construct
  misc_feature 1..20: note = spacer sequence
  source 1..20: mol_type = other RNA
ggaatacatgtgcagaacgt

SEQ ID NO: 2510 - RNA, 20 nt, synthetic construct
  misc_feature 1..20: note = spacer sequence
  source 1..20: mol_type = other RNA
tttattttatttttaatttt

SEQ ID NO: 2511 - RNA, 20 nt, synthetic construct
  misc_feature 1..20: note = spacer sequence
  source 1..20: mol_type = other RNA
caacatagctcttttatttt

SEQ ID NO: 2512 - RNA, 20 nt, synthetic construct
  misc_feature 1..20: note = spacer sequence
  source 1..20: mol_type = other RNA
cccaacatagctcttttatt

SEQ ID NO: 2513 - RNA, 20 nt, synthetic construct
  misc_feature 1..20: note = spacer sequence
  source 1..20: mol_type = other RNA
gttattatctcccaacatag

SEQ ID NO: 2514 - RNA, 20 nt, synthetic construct
  misc_feature 1..20: note = spacer sequence
  source 1..20: mol_type = other RNA
tttttttttttttttttttt

SEQ ID NO: 2515 - RNA, 20 nt, synthetic construct
  misc_feature 1..20: note = spacer sequence
  source 1..20: mol_type = other RNA
aaaaaaaaaaaaaaaaaaaa

SEQ ID NO: 2516 - RNA, 20 nt, synthetic construct
  misc_feature 1..20: note = spacer sequence
  source 1..20: mol_type = other RNA
caaaaaaaaaaaaaaaaaaa

SEQ ID NO: 2517 - RNA, 20 nt, synthetic construct
  misc_feature 1..20: note = spacer sequence
  source 1..20: mol_type = other RNA
gtctcaaaaaaaaaaaaaaa

SEQ ID NO: 2518 - RNA, 20 nt, synthetic construct
  misc_feature 1..20: note = spacer sequence
  source 1..20: mol_type = other RNA
cgctctgtcgcccaggctgg

SEQ ID NO: 2519 - RNA, 20 nt, synthetic construct
  misc_feature 1..20: note = spacer sequence
  source 1..20: mol_type = other RNA
ctctgtcgcccaggctggag

SEQ ID NO: 2520 - RNA, 20 nt, synthetic construct
  misc_feature 1..20: note = spacer sequence
  source 1..20: mol_type = other RNA
gtcgcccaggctggagtgca

SEQ ID NO: 2521 - RNA, 20 nt, synthetic construct
  misc_feature 1..20: note = spacer sequence
  source 1..20: mol_type = other RNA
cccaggctggagtgcagtgg

SEQ ID NO: 2522 - RNA, 20 nt, synthetic construct
  misc_feature 1..20: note = spacer sequence
  source 1..20: mol_type = other RNA
agcctgggcgacagagcgag

SEQ ID NO: 2523 - RNA, 20 nt, synthetic construct
  misc_feature 1..20: note = spacer sequence
  source 1..20: mol_type = other RNA
tgactcactgcaacctccgc

SEQ ID NO: 2524 - RNA, 20 nt, synthetic construct
  misc_feature 1..20: note = spacer sequence
  source 1..20: mol_type = other RNA
agattgcaccactgcactcc

SEQ ID NO: 2525 - RNA, 20 nt, synthetic construct
  misc_feature 1..20: note = spacer sequence
  source 1..20: mol_type = other RNA
ctgcaacctccgcctccagg

SEQ ID NO: 2526 - RNA, 20 nt, synthetic construct
  misc_feature 1..20: note = spacer sequence
  source 1..20: mol_type = other RNA
gcctccagggttctggccat

SEQ ID NO: 2527 - RNA, 20 nt, synthetic construct
  misc_feature 1..20: note = spacer sequence
  source 1..20: mol_type = other RNA
agggttctggccattctcct

SEQ ID NO: 2528 - RNA, 20 nt, synthetic construct
  misc_feature 1..20: note = spacer sequence
  source 1..20: mol_type = other RNA
ggccattctcctgcctcagc

SEQ ID NO: 2529 - RNA, 20 nt, synthetic construct
  misc_feature 1..20: note = spacer sequence
  source 1..20: mol_type = other RNA
cctgcctcagcctcccaagt

SEQ ID NO: 2530 - RNA, 20 nt, synthetic construct
  misc_feature 1..20: note = spacer sequence
  source 1..20: mol_type = other RNA
tgcctcagcctcccaagtag

SEQ ID NO: 2531 - RNA, 20 nt, synthetic construct
  misc_feature 1..20: note = spacer sequence
  source 1..20: mol_type = other RNA
gcctcccaagtagctgggac

SEQ ID NO: 2532 - RNA, 20 nt, synthetic construct
  misc_feature 1..20: note = spacer sequence
  source 1..20: mol_type = other RNA
caagtagctgggactagagg

SEQ ID NO: 2533 - RNA, 20 nt, synthetic construct
  misc_feature 1..20: note = spacer sequence
  source 1..20: mol_type = other RNA
cagctacttgggaggctgag

SEQ ID NO: 2534 - RNA, 20 nt, synthetic construct
  misc_feature 1..20: note = spacer sequence
  source 1..20: mol_type = other RNA
agtcccagctacttgggagg

SEQ ID NO: 2535 - RNA, 20 nt, synthetic construct
  misc_feature 1..20: note = spacer sequence
  source 1..20: mol_type = other RNA
actaaaaatacaaaaaatta

SEQ ID NO: 2536 - RNA, 20 nt, synthetic construct
  misc_feature 1..20: note = spacer sequence
  source 1..20: mol_type = other RNA
ctactaaaaatacaaaaaat

SEQ ID NO: 2537 - RNA, 20 nt, synthetic construct
  misc_feature 1..20: note = spacer sequence
  source 1..20: mol_type = other RNA
ccgtgttagccaggatggtc

SEQ ID NO: 2538 - RNA, 20 nt, synthetic construct
  misc_feature 1..20: note = spacer sequence
  source 1..20: mol_type = other RNA
tggctaacacggtgaaaccc

SEQ ID NO: 2539 - RNA, 20 nt, synthetic construct
  misc_feature 1..20: note = spacer sequence
  source 1..20: mol_type = other RNA
caatctcctgacctcgtgat

SEQ ID NO: 2540 - RNA, 20 nt, synthetic construct
  misc_feature 1..20: note = spacer sequence
  source 1..20: mol_type = other RNA
atctcctgacctcgtgatcc

SEQ ID NO: 2541 - RNA, 20 nt, synthetic construct
  misc_feature 1..20: note = spacer sequence
  source 1..20: mol_type = other RNA
cctgacctcgtgatccgccc

SEQ ID NO: 2542 - RNA, 20 nt, synthetic construct
  misc_feature 1..20: note = spacer sequence
  source 1..20: mol_type = other RNA
tgacctcgtgatccgcccgc

SEQ ID NO: 2543 - RNA, 20 nt, synthetic construct
  misc_feature 1..20: note = spacer sequence
  source 1..20: mol_type = other RNA
ggagattgagaccatcctgg

SEQ ID NO: 2544 - RNA, 20 nt, synthetic construct
  misc_feature 1..20: note = spacer sequence
  source 1..20: mol_type = other RNA
tgatccgcccgccttggctt

SEQ ID NO: 2545 - RNA, 20 nt, synthetic construct
  misc_feature 1..20: note = spacer sequence
  source 1..20: mol_type = other RNA
cgaggtcaggagattgagac

SEQ ID NO: 2546 - RNA, 20 nt, synthetic construct
  misc_feature 1..20: note = spacer sequence
  source 1..20: mol_type = other RNA
gcccgccttggctttccaaa

SEQ ID NO: 2547 - RNA, 20 nt, synthetic construct
  misc_feature 1..20: note = spacer sequence
  source 1..20: mol_type = other RNA
aaagtgctgggattacaggg

SEQ ID NO: 2548 - RNA, 20 nt, synthetic construct
  misc_feature 1..20: note = spacer sequence
  source 1..20: mol_type = other RNA
cagcactttggaaagccaag

SEQ ID NO: 2549 - RNA, 20 nt, synthetic construct
  misc_feature 1..20: note = spacer sequence
  source 1..20: mol_type = other RNA
cccctgtaatcccagcactt

SEQ ID NO: 2550 - RNA, 20 nt, synthetic construct
  misc_feature 1..20: note = spacer sequence
  source 1..20: mol_type = other RNA
gccaactgacttacagttct

SEQ ID NO: 2551 - RNA, 20 nt, synthetic construct
  misc_feature 1..20: note = spacer sequence
  source 1..20: mol_type = other RNA
gttggccgagcgcagtggct

SEQ ID NO: 2552 - RNA, 20 nt, synthetic construct
  misc_feature 1..20: note = spacer sequence
  source 1..20: mol_type = other RNA
ttaaattaaaagaaattggt

SEQ ID NO: 2553 - RNA, 20 nt, synthetic construct
  misc_feature 1..20: note = spacer sequence
  source 1..20: mol_type = other RNA
tttaatttaaagaactgtaa

SEQ ID NO: 2554 - RNA, 20 nt, synthetic construct
  misc_feature 1..20: note = spacer sequence
  source 1..20: mol_type = other RNA
ataccaatttcttttaattt

SEQ ID NO: 2555 - RNA, 20 nt, synthetic construct
  misc_feature 1..20: note = spacer sequence
  source 1..20: mol_type = other RNA
tttctataccaatttctttt

SEQ ID NO: 2556 - RNA, 20 nt, synthetic construct
  misc_feature 1..20: note = spacer sequence
  source 1..20: mol_type = other RNA
aaaacatattactaaaacga

SEQ ID NO: 2557 - RNA, 20 nt, synthetic construct
  misc_feature 1..20: note = spacer sequence
  source 1..20: mol_type = other RNA
ttttagtaatatgttttgga

SEQ ID NO: 2558 - RNA, 20 nt, synthetic construct
  misc_feature 1..20: note = spacer sequence
  source 1..20: mol_type = other RNA
gggtcgttttagtaatatgt

SEQ ID NO: 2559 - RNA, 20 nt, synthetic construct
  misc_feature 1..20: note = spacer sequence
  source 1..20: mol_type = other RNA
ctgggtcgttttagtaatat

SEQ ID NO: 2560 - RNA, 20 nt, synthetic construct
  misc_feature 1..20: note = spacer sequence
  source 1..20: mol_type = other RNA
ctctgggtcgttttagtaat

SEQ ID NO: 2561 - RNA, 20 nt, synthetic construct
  misc_feature 1..20: note = spacer sequence
  source 1..20: mol_type = other RNA
attgtccaacatgttcctaa

SEQ ID NO: 2562 - RNA, 20 nt, synthetic construct
  misc_feature 1..20: note = spacer sequence
  source 1..20: mol_type = other RNA
aacatgttcctaatacagca

SEQ ID NO: 2563 - RNA, 20 nt, synthetic construct
  misc_feature 1..20: note = spacer sequence
  source 1..20: mol_type = other RNA
taatacagcaagtcaaaatt

SEQ ID NO: 2564 - RNA, 20 nt, synthetic construct
  misc_feature 1..20: note = spacer sequence
  source 1..20: mol_type = other RNA
aaattcataatgacttggac

SEQ ID NO: 2565 - RNA, 20 nt, synthetic construct
  misc_feature 1..20: note = spacer sequence
  source 1..20: mol_type = other RNA
taatgacttggacggtcaaa

SEQ ID NO: 2566 - RNA, 20 nt, synthetic construct
  misc_feature 1..20: note = spacer sequence
  source 1..20: mol_type = other RNA
ttatgaattttgacttgctg

SEQ ID NO: 2567 - RNA, 20 nt, synthetic construct
  misc_feature 1..20: note = spacer sequence
  source 1..20: mol_type = other RNA
aagtcattatgaattttgac

SEQ ID NO: 2568 - RNA, 20 nt, synthetic construct
  misc_feature 1..20: note = spacer sequence
  source 1..20: mol_type = other RNA
aaaggagaatgttaactttt

SEQ ID NO: 2569 - RNA, 20 nt, synthetic construct
  misc_feature 1..20: note = spacer sequence
  source 1..20: mol_type = other RNA
ttttgaccgtccaagtcatt

SEQ ID NO: 2570 - RNA, 20 nt, synthetic construct
  misc_feature 1..20: note = spacer sequence
  source 1..20: mol_type = other RNA
ccttttgaccgtccaagtca

SEQ ID NO: 2571 - RNA, 20 nt, synthetic construct
  misc_feature 1..20: note = spacer sequence
  source 1..20: mol_type = other RNA
aaagttaacattctcctttt

SEQ ID NO: 2572 - RNA, 20 nt, synthetic construct
  misc_feature 1..20: note = spacer sequence
  source 1..20: mol_type = other RNA
ttttcaaaagttaacattct

SEQ ID NO: 2573 - RNA, 20 nt, synthetic construct
  misc_feature 1..20: note = spacer sequence
  source 1..20: mol_type = other RNA
acggctttcattttcaaaag

SEQ ID NO: 2574 - RNA, 20 nt, synthetic construct
  misc_feature 1..20: note = spacer sequence
  source 1..20: mol_type = other RNA
gagtaggtgtttggcaccca

SEQ ID NO: 2575 - RNA, 20 nt, synthetic construct
  misc_feature 1..20: note = spacer sequence
  source 1..20: mol_type = other RNA
gaatgtccacggctttcatt

SEQ ID NO: 2576 - RNA, 20 nt, synthetic construct
  misc_feature 1..20: note = spacer sequence
  source 1..20: mol_type = other RNA
ctgaagaagaatgctgtttc

SEQ ID NO: 2577 - RNA, 20 nt, synthetic construct
  misc_feature 1..20: note = spacer sequence
  source 1..20: mol_type = other RNA
gtgaaattttgggtgccaaa

SEQ ID NO: 2578 - RNA, 20 nt, synthetic construct
  misc_feature 1..20: note = spacer sequence
  source 1..20: mol_type = other RNA
tcagtgaaattttgggtgcc

SEQ ID NO: 2579 - RNA, 20 nt, synthetic construct
  misc_feature 1..20: note = spacer sequence
  source 1..20: mol_type = other RNA
tcttcagtgaaattttgggt

SEQ ID NO: 2580 - RNA, 20 nt, synthetic construct
  misc_feature 1..20: note = spacer sequence
  source 1..20: mol_type = other RNA
tagtatcaaaccaaagtgca

SEQ ID NO: 2581 - RNA, 20 nt, synthetic construct
  misc_feature 1..20: note = spacer sequence
  source 1..20: mol_type = other RNA
aaccaaagtgcaaagcaata

SEQ ID NO: 2582 - RNA, 20 nt, synthetic construct
  misc_feature 1..20: note = spacer sequence
  source 1..20: mol_type = other RNA
aatttatattgctttgcact

SEQ ID NO: 2583 - RNA, 20 nt, synthetic construct
  misc_feature 1..20: note = spacer sequence
  source 1..20: mol_type = other RNA
tggcctctaatttatattgc

SEQ ID NO: 2584 - RNA, 20 nt, synthetic construct
  misc_feature 1..20: note = spacer sequence
  source 1..20: mol_type = other RNA
cttggcgtcaatttacttct

SEQ ID NO: 2585 - RNA, 20 nt, synthetic construct
  misc_feature 1..20: note = spacer sequence
  source 1..20: mol_type = other RNA
tggcgtcaatttacttctgt

SEQ ID NO: 2586 - RNA, 20 nt, synthetic construct
  misc_feature 1..20: note = spacer sequence
  source 1..20: mol_type = other RNA
atttacttctgtaaaacaga

SEQ ID NO: 2587 - RNA, 20 nt, synthetic construct
  misc_feature 1..20: note = spacer sequence
  source 1..20: mol_type = other RNA
gtaaaacagattctatgttc

SEQ ID NO: 2588 - RNA, 20 nt, synthetic construct
  misc_feature 1..20: note = spacer sequence
  source 1..20: mol_type = other RNA
gttttacagaagtaaattga

SEQ ID NO: 2589 - RNA, 20 nt, synthetic construct
  misc_feature 1..20: note = spacer sequence
  source 1..20: mol_type = other RNA
atgttccttttctatgatca

SEQ ID NO: 2590 - RNA, 20 nt, synthetic construct
  misc_feature 1..20: note = spacer sequence
  source 1..20: mol_type = other RNA
ttttctatgatcagtttaca

SEQ ID NO: 2591 - RNA, 20 nt, synthetic construct
  misc_feature 1..20: note = spacer sequence
  source 1..20: mol_type = other RNA
atgatcagtttacatttgaa

SEQ ID NO: 2592 - RNA, 20 nt, synthetic construct
  misc_feature 1..20: note = spacer sequence
  source 1..20: mol_type = other RNA
tagaaaaggaacatagaatc

SEQ ID NO: 2593 - RNA, 20 nt, synthetic construct
  misc_feature 1..20: note = spacer sequence
  source 1..20: mol_type = other RNA
gtttacatttgaaacattag

SEQ ID NO: 2594 - RNA, 20 nt, synthetic construct
  misc_feature 1..20: note = spacer sequence
  source 1..20: mol_type = other RNA
aatgtaaactgatcatagaa

SEQ ID NO: 2595 - RNA, 20 nt, synthetic construct
  misc_feature 1..20: note = spacer sequence
  source 1..20: mol_type = other RNA
aatgtttcaaatgtaaactg

SEQ ID NO: 2596 - RNA, 20 nt, synthetic construct
  misc_feature 1..20: note = spacer sequence
  source 1..20: mol_type = other RNA
ctaatgagggaaggaaatgg

SEQ ID NO: 2597 - RNA, 20 nt, synthetic construct
  misc_feature 1..20: note = spacer sequence
  source 1..20: mol_type = other RNA
ttagtgaaaaaatctaatgt

SEQ ID NO: 2598 - RNA, 20 nt, synthetic construct
  misc_feature 1..20: note = spacer sequence
  source 1..20: mol_type = other RNA
ctcattagtgaaaaaatcta

SEQ ID NO: 2599 - RNA, 20 nt, synthetic construct
  misc_feature 1..20: note = spacer sequence
  source 1..20: mol_type = other RNA
ttccctcattagtgaaaaaa

SEQ ID NO: 2600 - RNA, 20 nt, synthetic construct
  misc_feature 1..20: note = spacer sequence
  source 1..20: mol_type = other RNA
gtgctactttcaagtcagtg

SEQ ID NO: 2601 - RNA, 20 nt, synthetic construct
  misc_feature 1..20: note = spacer sequence
  source 1..20: mol_type = other RNA
agtcagtgaagctaaggtct

SEQ ID NO: 2602 - RNA, 20 nt, synthetic construct
  misc_feature 1..20: note = spacer sequence
  source 1..20: mol_type = other RNA
gtgaagctaaggtctccttc

SEQ ID NO: 2603 - RNA, 20 nt, synthetic construct
  misc_feature 1..20: note = spacer sequence
  source 1..20: mol_type = other RNA
ctgacttgaaagtagcacag

SEQ ID NO: 2604 - RNA, 20 nt, synthetic construct
  misc_feature 1..20: note = spacer sequence
  source 1..20: mol_type = other RNA
ccttctcaaagtagagctgg

SEQ ID NO: 2605 - RNA, 20 nt, synthetic construct
  misc_feature 1..20: note = spacer sequence
  source 1..20: mol_type = other RNA
ttctcaaagtagagctggaa

SEQ ID NO: 2606 - RNA, 20 nt, synthetic construct
  misc_feature 1..20: note = spacer sequence
  source 1..20: mol_type = other RNA
caaagtagagctggaatcag

SEQ ID NO: 2607 - RNA, 20 nt, synthetic construct
  misc_feature 1..20: note = spacer sequence
  source 1..20: mol_type = other RNA
aagtagagctggaatcagag

SEQ ID NO: 2608 - RNA, 20 nt, synthetic construct
  misc_feature 1..20: note = spacer sequence
  source 1..20: mol_type = other RNA
actttgagaaggagacctta

SEQ ID NO: 2609 - RNA, 20 nt, synthetic construct
  misc_feature 1..20: note = spacer sequence
  source 1..20: mol_type = other RNA
agctctactttgagaaggag

SEQ ID NO: 2610 - RNA, 20 nt, synthetic construct
  misc_feature 1..20: note = spacer sequence
  source 1..20: mol_type = other RNA
gaggtgagaaatgtcgggac

SEQ ID NO: 2611 - RNA, 20 nt, synthetic construct
  misc_feature 1..20: note = spacer sequence
  source 1..20: mol_type = other RNA
gattccagctctactttgag

SEQ ID NO: 2612 - RNA, 20 nt, synthetic construct
  misc_feature 1..20: note = spacer sequence
  source 1..20: mol_type = other RNA
cctctgattccagctctact

SEQ ID NO: 2613 - RNA, 20 nt, synthetic construct
  misc_feature 1..20: note = spacer sequence
  source 1..20: mol_type = other RNA
cacctctgattccagctcta

SEQ ID NO: 2614 - RNA, 20 nt, synthetic construct
  misc_feature 1..20: note = spacer sequence
  source 1..20: mol_type = other RNA
ggacttgaagagttaggctg

SEQ ID NO: 2615 - RNA, 20 nt, synthetic construct
  misc_feature 1..20: note = spacer sequence
  source 1..20: mol_type = other RNA
cgacatttctcacctctgat

SEQ ID NO: 2616 - RNA, 20 nt, synthetic construct
  misc_feature 1..20: note = spacer sequence
  source 1..20: mol_type = other RNA
agtcccgacatttctcacct

SEQ ID NO: 2617 - RNA, 20 nt, synthetic construct
  misc_feature 1..20: note = spacer sequence
  source 1..20: mol_type = other RNA
tcaagtcccgacatttctca

SEQ ID NO: 2618 - RNA, 20 nt, synthetic construct
  misc_feature 1..20: note = spacer sequence
  source 1..20: mol_type = other RNA
acccagcgtctagaaccaat

SEQ ID NO: 2619 - RNA, 20 nt, synthetic construct
  misc_feature 1..20: note = spacer sequence
  source 1..20: mol_type = other RNA
agaaccaattccagcttcat

SEQ ID NO: 2620 - RNA, 20 nt, synthetic construct
  misc_feature 1..20: note = spacer sequence
  source 1..20: mol_type = other RNA
agacgctgggtagatgcaaa

SEQ ID NO: 2621 - RNA, 20 nt, synthetic construct
  misc_feature 1..20: note = spacer sequence
  source 1..20: mol_type = other RNA
agcttcataactcagctgtg

SEQ ID NO: 2622 - RNA, 20 nt, synthetic construct
  misc_feature 1..20: note = spacer sequence
  source 1..20: mol_type = other RNA
taactcagctgtgaacgaac

SEQ ID NO: 2623 - RNA, 20 nt, synthetic construct
  misc_feature 1..20: note = spacer sequence
  source 1..20: mol_type = other RNA
gctgtgaacgaactccctta

SEQ ID NO: 2624 - RNA, 20 nt, synthetic construct
  misc_feature 1..20: note = spacer sequence
  source 1..20: mol_type = other RNA
cagctgagttatgaagctgg

SEQ ID NO: 2625 - RNA, 20 nt, synthetic construct
  misc_feature 1..20: note = spacer sequence
  source 1..20: mol_type = other RNA
ttcacagctgagttatgaag

SEQ ID NO: 2626 - RNA, 20 nt, synthetic construct
  misc_feature 1..20: note = spacer sequence
  source 1..20: mol_type = other RNA
cttaggcattggtagccacg

SEQ ID NO: 2627 - RNA, 20 nt, synthetic construct
  misc_feature 1..20: note = spacer sequence
  source 1..20: mol_type = other RNA
agactagaaaacccggaaac

SEQ ID NO: 2628 - RNA, 20 nt, synthetic construct
  misc_feature 1..20: note = spacer sequence
  source 1..20: mol_type = other RNA
tgaactactggctacgtggc

SEQ ID NO: 2629 - RNA, 20 nt, synthetic construct
  misc_feature 1..20: note = spacer sequence
  source 1..20: mol_type = other RNA
agtcttgaactactggctac

SEQ ID NO: 2630 - RNA, 20 nt, synthetic construct
  misc_feature 1..20: note = spacer sequence
  source 1..20: mol_type = other RNA
gggttttctagtcttgaact

SEQ ID NO: 2631 - RNA, 20 nt, synthetic construct
  misc_feature 1..20: note = spacer sequence
  source 1..20: mol_type = other RNA
cccgtttccgggttttctag

SEQ ID NO: 2632 - RNA, 20 nt, synthetic construct
  misc_feature 1..20: note = spacer sequence
  source 1..20: mol_type = other RNA
gcactttcacccgtttccgg

SEQ ID NO: 2633 - RNA, 20 nt, synthetic construct
  misc_feature 1..20: note = spacer sequence
  source 1..20: mol_type = other RNA
agagatgtaagtgtatgttc

SEQ ID NO: 2634 - RNA, 20 nt, synthetic construct
  misc_feature 1..20: note = spacer sequence
  source 1..20: mol_type = other RNA
agataacagtctgcactttc

SEQ ID NO: 2635 - RNA, 20 nt, synthetic construct
  misc_feature 1..20: note = spacer sequence
  source 1..20: mol_type = other RNA
ctagataacagtctgcactt

SEQ ID NO: 2636 - RNA, 20 nt, synthetic construct
  misc_feature 1..20: note = spacer sequence
  source 1..20: mol_type = other RNA
ggagggggaatgggtctcat

SEQ ID NO: 2637 - RNA, 20 nt, synthetic construct
  misc_feature 1..20: note = spacer sequence
  source 1..20: mol_type = other RNA
agaacatacacttacatctc

SEQ ID NO: 2638 - RNA, 20 nt, synthetic construct
  misc_feature 1..20: note = spacer sequence
  source 1..20: mol_type = other RNA
ccctccagaacatacactta

SEQ ID NO: 2639 - RNA, 20 nt, synthetic construct
  misc_feature 1..20: note = spacer sequence
  source 1..20: mol_type = other RNA
cattctgggcactgggaggc

SEQ ID NO: 2640 - RNA, 20 nt, synthetic construct
  misc_feature 1..20: note = spacer sequence
  source 1..20: mol_type = other RNA
ttctgggcactgggaggcac

SEQ ID NO: 2641 - RNA, 20 nt, synthetic construct
  misc_feature 1..20: note = spacer sequence
  source 1..20: mol_type = other RNA
gggcactgggaggcacattt

SEQ ID NO: 2642 - RNA, 20 nt, synthetic construct
  misc_feature 1..20: note = spacer sequence
  source 1..20: mol_type = other RNA
cagtgcccagaatgagaccc

SEQ ID NO: 2643 - RNA, 20 nt, synthetic construct
  misc_feature 1..20: note = spacer sequence
  source 1..20: mol_type = other RNA
taaatgtgcctcccagtgcc

SEQ ID NO: 2644 - RNA, 20 nt, synthetic construct
  misc_feature 1..20: note = spacer sequence
  source 1..20: mol_type = other RNA
aaatagtgtcatcatgggag

SEQ ID NO: 2645 - RNA, 20 nt, synthetic construct
  misc_feature 1..20: note = spacer sequence
  source 1..20: mol_type = other RNA
tcatgggagctgctgacgat

SEQ ID NO: 2646 - RNA, 20 nt, synthetic construct
  misc_feature 1..20: note = spacer sequence
  source 1..20: mol_type = other RNA
tgggagctgctgacgatttg

SEQ ID NO: 2647 - RNA, 20 nt, synthetic construct
  misc_feature 1..20: note = spacer sequence
  source 1..20: mol_type = other RNA
catgatgacactattttgat

SEQ ID NO: 2648 - RNA, 20 nt, synthetic construct
  misc_feature 1..20: note = spacer sequence
  source 1..20: mol_type = other RNA
gcagctcccatgatgacact

SEQ ID NO: 2649 - RNA, 20 nt, synthetic construct
  misc_feature 1..20: note = spacer sequence
  source 1..20: mol_type = other RNA
tcagcagctcccatgatgac

SEQ ID NO: 2650 - RNA, 20 nt, synthetic construct
  misc_feature 1..20: note = spacer sequence
  source 1..20: mol_type = other RNA
aatcgtcagcagctcccatg

SEQ ID NO: 2651 - RNA, 20 nt, synthetic construct
  misc_feature 1..20: note = spacer sequence
  source 1..20: mol_type = other RNA
tcaaactgtaggcaaaacac

SEQ ID NO: 2652 - RNA, 20 nt, synthetic construct
  misc_feature 1..20: note = spacer sequence
  source 1..20: mol_type = other RNA
aactgtaggcaaaacacatg

SEQ ID NO: 2653 - RNA, 20 nt, synthetic construct
  misc_feature 1..20: note = spacer sequence
  source 1..20: mol_type = other RNA
agaatgttccaccaatgtgc

SEQ ID NO: 2654 - RNA, 20 nt, synthetic construct
  misc_feature 1..20: note = spacer sequence
  source 1..20: mol_type = other RNA
ggacatgtgttttgcctaca

SEQ ID NO: 2655 - RNA, 20 nt, synthetic construct
  misc_feature 1..20: note = spacer sequence
  source 1..20: mol_type = other RNA
accaatgtgcgcaaacacaa

SEQ ID NO: 2656 - RNA, 20 nt, synthetic construct
  misc_feature 1..20: note = spacer sequence
  source 1..20: mol_type = other RNA
agggtcaagagcggcttgca

SEQ ID NO: 2657 - RNA, 20 nt, synthetic construct
  misc_feature 1..20: note = spacer sequence
  source 1..20: mol_type = other RNA
agccccagcaagcacattgt

SEQ ID NO: 2658 - RNA, 20 nt, synthetic construct
  misc_feature 1..20: note = spacer sequence
  source 1..20: mol_type = other RNA
agagcggcttgcaagtccta

SEQ ID NO: 2659 - RNA, 20 nt, synthetic construct
  misc_feature 1..20: note = spacer sequence
  source 1..20: mol_type = other RNA
tgaccctcgagccccagcaa

SEQ ID NO: 2660 - RNA, 20 nt, synthetic construct
  misc_feature 1..20: note = spacer sequence
  source 1..20: mol_type = other RNA
taaactttaattttcccatc

SEQ ID NO: 2661 - RNA, 20 nt, synthetic construct
  misc_feature 1..20: note = spacer sequence
  source 1..20: mol_type = other RNA
catcataggcccggctgacc

SEQ ID NO: 2662 - RNA, 20 nt, synthetic construct
  misc_feature 1..20: note = spacer sequence
  source 1..20: mol_type = other RNA
taggcccggctgaccatcct

SEQ ID NO: 2663 - RNA, 20 nt, synthetic construct
  misc_feature 1..20: note = spacer sequence
  source 1..20: mol_type = other RNA
gccgggcctatgatgggaaa

SEQ ID NO: 2664 - RNA, 20 nt, synthetic construct
  misc_feature 1..20: note = spacer sequence
  source 1..20: mol_type = other RNA
tcttgttatcaaactggatg

SEQ ID NO: 2665 - RNA, 20 nt, synthetic construct
  misc_feature 1..20: note = spacer sequence
  source 1..20: mol_type = other RNA
tgttatcaaactggatgcat

SEQ ID NO: 2666 - RNA, 20 nt, synthetic construct
  misc_feature 1..20: note = spacer sequence
  source 1..20: mol_type = other RNA
aactggatgcatcggaccaa

SEQ ID NO: 2667 - RNA, 20 nt, synthetic construct
  misc_feature 1..20: note = spacer sequence
  source 1..20: mol_type = other RNA
agtttgataacaagaggatg

SEQ ID NO: 2668 - RNA, 20 nt, synthetic construct
  misc_feature 1..20: note = spacer sequence
  source 1..20: mol_type = other RNA
gaccaattcttcatgtccct

SEQ ID NO: 2669 - RNA, 20 nt, synthetic construct
  misc_feature 1..20: note = spacer sequence
  source 1..20: mol_type = other RNA
gatgcatccagtttgataac

SEQ ID NO: 2670 - RNA, 20 nt, synthetic construct
  misc_feature 1..20: note = spacer sequence
  source 1..20: mol_type = other RNA
tcatgtccctctaggactct

SEQ ID NO: 2671 - RNA, 20 nt, synthetic construct
  misc_feature 1..20: note = spacer sequence
  source 1..20: mol_type = other RNA
tgtccctctaggactcttaa

SEQ ID NO: 2672 - RNA, 20 nt, synthetic construct
  misc_feature 1..20: note = spacer sequence
  source 1..20: mol_type = other RNA
ctctaggactcttaaacagg

SEQ ID NO: 2673 - RNA, 20 nt, synthetic construct
  misc_feature 1..20: note = spacer sequence
  source 1..20: mol_type = other RNA
aggactcttaaacaggagcc

SEQ ID NO: 2674 - RNA, 20 nt, synthetic construct
  misc_feature 1..20: note = spacer sequence
  source 1..20: mol_type = other RNA
tagagggacatgaagaattg

SEQ ID NO: 2675 - RNA, 20 nt, synthetic construct
  misc_feature 1..20: note = spacer sequence
  source 1..20: mol_type = other RNA
taaacaggagccacattcaa

SEQ ID NO: 2676 - RNA, 20 nt, synthetic construct
  misc_feature 1..20: note = spacer sequence
  source 1..20: mol_type = other RNA
tgtttaagagtcctagaggg

SEQ ID NO: 2677 - RNA, 20 nt, synthetic construct
  misc_feature 1..20: note = spacer sequence
  source 1..20: mol_type = other RNA
atatccaagagcctaatggt

SEQ ID NO: 2678 - RNA, 20 nt, synthetic construct
  misc_feature 1..20: note = spacer sequence
  source 1..20: mol_type = other RNA
aagagcctaatggtatgatc

SEQ ID NO: 2679 - RNA, 20 nt, synthetic construct
  misc_feature 1..20: note = spacer sequence
  source 1..20: mol_type = other RNA
tggatattgaatgtggctcc

SEQ ID NO: 2680 - RNA, 20 nt, synthetic construct
  misc_feature 1..20: note = spacer sequence
  source 1..20: mol_type = other RNA
taccattaggctcttggata

SEQ ID NO: 2681 - RNA, 20 nt, synthetic construct
  misc_feature 1..20: note = spacer sequence
  source 1..20: mol_type = other RNA
gatgatccactaacaaccag

SEQ ID NO: 2682 - RNA, 20 nt, synthetic construct
  misc_feature 1..20: note = spacer sequence
  source 1..20: mol_type = other RNA
gatcataccattaggctctt

SEQ ID NO: 2683 - RNA, 20 nt, synthetic construct
  misc_feature 1..20: note = spacer sequence
  source 1..20: mol_type = other RNA
tcagatcataccattaggct

SEQ ID NO: 2684 - RNA, 20 nt, synthetic construct
  misc_feature 1..20: note = spacer sequence
  source 1..20: mol_type = other RNA
actaacaaccagcccatccc

SEQ ID NO: 2685 - RNA, 20 nt, synthetic construct
  misc_feature 1..20: note = spacer sequence
  source 1..20: mol_type = other RNA
ctgtactggagacaagactc

SEQ ID NO: 2686 - RNA, 20 nt, synthetic construct
  misc_feature 1..20: note = spacer sequence
  source 1..20: mol_type = other RNA
agtacagggatgggctggtt

SEQ ID NO: 2687 - RNA, 20 nt, synthetic construct
  misc_feature 1..20: note = spacer sequence
  source 1..20: mol_type = other RNA
ccagtacagggatgggctgg

SEQ ID NO: 2688 - RNA, 20 nt, synthetic construct
  misc_feature 1..20: note = spacer sequence
  source 1..20: mol_type = other RNA
tgtctccagtacagggatgg

SEQ ID NO: 2689 - RNA, 20 nt, synthetic construct
  misc_feature 1..20: note = spacer sequence
  source 1..20: mol_type = other RNA
cttgtgcccattgagagtac

SEQ ID NO: 2690 - RNA, 20 nt, synthetic construct
  misc_feature 1..20: note = spacer sequence
  source 1..20: mol_type = other RNA
atgggcacaagcgagtcttg

SEQ ID NO: 2691 - RNA, 20 nt, synthetic construct
  misc_feature 1..20: note = spacer sequence
  source 1..20: mol_type = other RNA
caatgggcacaagcgagtct

SEQ ID NO: 2692 - RNA, 20 nt, synthetic construct
  misc_feature 1..20: note = spacer sequence
  source 1..20: mol_type = other RNA
tactctcaatgggcacaagc

SEQ ID NO: 2693 - RNA, 20 nt, synthetic construct
  misc_feature 1..20: note = spacer sequence
  source 1..20: mol_type = other RNA
caggtgctcatgctccagac

SEQ ID NO: 2694 - RNA, 20 nt, synthetic construct
  misc_feature 1..20: note = spacer sequence
  source 1..20: mol_type = other RNA
tgctccagactttgatggtc

SEQ ID NO: 2695 - RNA, 20 nt, synthetic construct
  misc_feature 1..20: note = spacer sequence
  source 1..20: mol_type = other RNA
agactttgatggtcctgtca

SEQ ID NO: 2696 - RNA, 20 nt, synthetic construct
  misc_feature 1..20: note = spacer sequence
  source 1..20: mol_type = other RNA
ggagcatgagcacctgtgaa

SEQ ID NO: 2697 - RNA, 20 nt, synthetic construct
  misc_feature 1..20: note = spacer sequence
  source 1..20: mol_type = other RNA
aagtctggagcatgagcacc

SEQ ID NO: 2698 - RNA, 20 nt, synthetic construct
  misc_feature 1..20: note = spacer sequence
  source 1..20: mol_type = other RNA
tgtcaccagaggcagacacg

SEQ ID NO: 2699 - RNA, 20 nt, synthetic construct
  misc_feature 1..20: note = spacer sequence
  source 1..20: mol_type = other RNA
ccagaggcagacacgatgta

SEQ ID NO: 2700 - RNA, 20 nt, synthetic construct
  misc_feature 1..20: note = spacer sequence
  source 1..20: mol_type = other RNA
ggtgacaggaccatcaaagt

SEQ ID NO: 2701 - RNA, 20 nt, synthetic construct
  misc_feature 1..20: note = spacer sequence
  source 1..20: mol_type = other RNA
gcctctggtgacaggaccat

SEQ ID NO: 2702 - RNA, 20 nt, synthetic construct
  misc_feature 1..20: note = spacer sequence
  source 1..20: mol_type = other RNA
tgtctgcctctggtgacagg

SEQ ID NO: 2703 - RNA, 20 nt, synthetic construct
  misc_feature 1..20: note = spacer sequence
  source 1..20: mol_type = other RNA
cgtcaaagtctactacgttg

SEQ ID NO: 2704 - RNA, 20 nt, synthetic construct
  misc_feature 1..20: note = spacer sequence
  source 1..20: mol_type = other RNA
tcaaagtctactacgttgac

SEQ ID NO: 2705 - RNA, 20 nt, synthetic construct
  misc_feature 1..20: note = spacer sequence
  source 1..20: mol_type = other RNA
aagtctactacgttgacagc

SEQ ID NO: 2706 - RNA, 20 nt, synthetic construct
  misc_feature 1..20: note = spacer sequence
  source 1..20: mol_type = other RNA
actacgttgacagcagctca

SEQ ID NO: 2707 - RNA, 20 nt, synthetic construct
  misc_feature 1..20: note = spacer sequence
  source 1..20: mol_type = other RNA
acgtagtagactttgacgag

SEQ ID NO: 2708 - RNA, 20 nt, synthetic construct
  misc_feature 1..20: note = spacer sequence
  source 1..20: mol_type = other RNA
gtggacaaccaggacaccac

SEQ ID NO: 2709 - RNA, 20 nt, synthetic construct
  misc_feature 1..20: note = spacer sequence
  source 1..20: mol_type = other RNA
actgagctgctgtcaacgta

SEQ ID NO: 2710 - RNA, 20 nt, synthetic construct
  misc_feature 1..20: note = spacer sequence
  source 1..20: mol_type = other RNA
tggttgtccactgagctgct

SEQ ID NO: 2711 - RNA, 20 nt, synthetic construct
  misc_feature 1..20: note = spacer sequence
  source 1..20: mol_type = other RNA
ctttacgtggtgtcctggtt

SEQ ID NO: 2712 - RNA, 20 nt, synthetic construct
  misc_feature 1..20: note = spacer sequence
  source 1..20: mol_type = other RNA
gtcgcagaagccatgtccca

SEQ ID NO: 2713 - RNA, 20 nt, synthetic construct
  misc_feature 1..20: note = spacer sequence
  source 1..20: mol_type = other RNA
cagaagccatgtcccacaca

SEQ ID NO: 2714 - RNA, 20 nt, synthetic construct
  misc_feature 1..20: note = spacer sequence
  source 1..20: mol_type = other RNA
gcgaccgatatcactttacg

SEQ ID NO: 2715 - RNA, 20 nt, synthetic construct
  misc_feature 1..20: note = spacer sequence
  source 1..20: mol_type = other RNA
cacacagcaatggagcggtc

SEQ ID NO: 2716 - RNA, 20 nt, synthetic construct
  misc_feature 1..20: note = spacer sequence
  source 1..20: mol_type = other RNA
attgctgtgtgggacatggc

SEQ ID NO: 2717 - RNA, 20 nt, synthetic construct
  misc_feature 1..20: note = spacer sequence
  source 1..20: mol_type = other RNA
ttggaacaggtcaccatcag

SEQ ID NO: 2718 - RNA, 20 nt, synthetic construct
  misc_feature 1..20: note = spacer sequence
  source 1..20: mol_type = other RNA
aaggaccgctccattgctgt

SEQ ID NO: 2719 - RNA, 20 nt, synthetic construct
  misc_feature 1..20: note = spacer sequence
  source 1..20: mol_type = other RNA
ccatcagtccactgctgaag

SEQ ID NO: 2720 - RNA, 20 nt, synthetic construct
  misc_feature 1..20: note = spacer sequence
  source 1..20: mol_type = other RNA
gtccactgctgaagcgtaag

SEQ ID NO: 2721 - RNA, 20 nt, synthetic construct
  misc_feature 1..20: note = spacer sequence
  source 1..20: mol_type = other RNA
actgctgaagcgtaagtgca

SEQ ID NO: 2722 - RNA, 20 nt, synthetic construct
  misc_feature 1..20: note = spacer sequence
  source 1..20: mol_type = other RNA
gcagtggactgatggtgacc

SEQ ID NO: 2723 - RNA, 20 nt, synthetic construct
  misc_feature 1..20: note = spacer sequence
  source 1..20: mol_type = other RNA
tcattgtggtggattaatgt

SEQ ID NO: 2724 - RNA, 20 nt, synthetic construct
  misc_feature 1..20: note = spacer sequence
  source 1..20: mol_type = other RNA
ttgtggtggattaatgtgtt

SEQ ID NO: 2725 - RNA, 20 nt, synthetic construct
  misc_feature 1..20: note = spacer sequence
  source 1..20: mol_type = other RNA
accacaatgaggatgtactg

SEQ ID NO: 2726 - RNA, 20 nt, synthetic construct
  misc_feature 1..20: note = spacer sequence
  source 1..20: mol_type = other RNA
taacacattaatccaccaca

SEQ ID NO: 2727 - RNA, 20 nt, synthetic construct
  misc_feature 1..20: note = spacer sequence
  source 1..20: mol_type = other RNA
cccgtgttcacttcccacac

SEQ ID NO: 2728 - RNA, 20 nt, synthetic construct
  misc_feature 1..20: note = spacer sequence
  source 1..20: mol_type = other RNA
cttcccacactctcaccgta

SEQ ID NO: 2729 - RNA, 20 nt, synthetic construct
  misc_feature 1..20: note = spacer sequence
  source 1..20: mol_type = other RNA
cacactctcaccgtagaatc

SEQ ID NO: 2730 - RNA, 20 nt, synthetic construct
  misc_feature 1..20: note = spacer sequence
  source 1..20: mol_type = other RNA
caccgtagaatccgaagagc

SEQ ID NO: 2731 - RNA, 20 nt, synthetic construct
  misc_feature 1..20: note = spacer sequence
  source 1..20: mol_type = other RNA
ccgtagaatccgaagagcca

SEQ ID NO: 2732 - RNA, 20 nt, synthetic construct
  misc_feature 1..20: note = spacer sequence
  source 1..20: mol_type = other RNA
acggtgagagtgtgggaagt

SEQ ID NO: 2733 - RNA, 20 nt, synthetic construct
  misc_feature 1..20: note = spacer sequence
  source 1..20: mol_type = other RNA
gaagagccagttacaatgac

SEQ ID NO: 2734 - RNA, 20 nt, synthetic construct
  misc_feature 1..20: note = spacer sequence
  source 1..20: mol_type = other RNA
gattctacggtgagagtgtg

SEQ ID NO: 2735 - RNA, 20 nt, synthetic construct
  misc_feature 1..20: note = spacer sequence
  source 1..20: mol_type = other RNA
tcggattctacggtgagagt

SEQ ID NO: 2736 - RNA, 20 nt, synthetic construct
  misc_feature 1..20: note = spacer sequence
  source 1..20: mol_type = other RNA
ttgtaactggctcttcggat

SEQ ID NO: 2737 - RNA, 20 nt, synthetic construct
  misc_feature 1..20: note = spacer sequence
  source 1..20: mol_type = other RNA
tcctactgcagatagaggac

SEQ ID NO: 2738 - RNA, 20 nt, synthetic construct
  misc_feature 1..20: note = spacer sequence
  source 1..20: mol_type = other RNA
tactgcagatagaggacaga

SEQ ID NO: 2739 - RNA, 20 nt, synthetic construct
  misc_feature 1..20: note = spacer sequence
  source 1..20: mol_type = other RNA
gcagtaggatgagcgtgtca

SEQ ID NO: 2740 - RNA, 20 nt, synthetic construct
  misc_feature 1..20: note = spacer sequence
  source 1..20: mol_type = other RNA
atctgcagtaggatgagcgt

SEQ ID NO: 2741 - RNA, 20 nt, synthetic construct
  misc_feature 1..20: note = spacer sequence
  source 1..20: mol_type = other RNA
tctatctgcagtaggatgag

SEQ ID NO: 2742 - RNA, 20 nt, synthetic construct
  misc_feature 1..20: note = spacer sequence
  source 1..20: mol_type = other RNA
gtcctctatctgcagtagga

SEQ ID NO: 2743 - RNA, 20 nt, synthetic construct
  misc_feature 1..20: note = spacer sequence
  source 1..20: mol_type = other RNA
aacattccaggctggtttta

SEQ ID NO: 2744 - RNA, 20 nt, synthetic construct
  misc_feature 1..20: note = spacer sequence
  source 1..20: mol_type = other RNA
aggctggttttatcccaaat

SEQ ID NO: 2745 - RNA, 20 nt, synthetic construct
  misc_feature 1..20: note = spacer sequence
  source 1..20: mol_type = other RNA
caaatcttaattatcttgta

SEQ ID NO: 2746 - RNA, 20 nt, synthetic construct
  misc_feature 1..20: note = spacer sequence
  source 1..20: mol_type = other RNA
taattatcttgtaggccact

SEQ ID NO: 2747 - RNA, 20 nt, synthetic construct
  misc_feature 1..20: note = spacer sequence
  source 1..20: mol_type = other RNA
tgtaggccactgataatttt

SEQ ID NO: 2748 - RNA, 20 nt, synthetic construct
  misc_feature 1..20: note = spacer sequence
  source 1..20: mol_type = other RNA
gtggcctacaagataattaa

SEQ ID NO: 2749 - RNA, 20 nt, synthetic construct
  misc_feature 1..20: note = spacer sequence
  source 1..20: mol_type = other RNA
tcatcgtactgtaaaccata

SEQ ID NO: 2750 - RNA, 20 nt, synthetic construct
  misc_feature 1..20: note = spacer sequence
  source 1..20: mol_type = other RNA
tcgtactgtaaaccatagac

SEQ ID NO: 2751 - RNA, 20 nt, synthetic construct
  misc_feature 1..20: note = spacer sequence
  source 1..20: mol_type = other RNA
tactgtaaaccatagacacc

SEQ ID NO: 2752 - RNA, 20 nt, synthetic construct
  misc_feature 1..20: note = spacer sequence
  source 1..20: mol_type = other RNA
atggtttacagtacgatgat

SEQ ID NO: 2753 - RNA, 20 nt, synthetic construct
  misc_feature 1..20: note = spacer sequence
  source 1..20: mol_type = other RNA
gagtggtactgaatcctctg

SEQ ID NO: 2754 - RNA, 20 nt, synthetic construct
  misc_feature 1..20: note = spacer sequence
  source 1..20: mol_type = other RNA
gaaaatagtaaaggtgtcta

SEQ ID NO: 2755 - RNA, 20 nt, synthetic construct
  misc_feature 1..20: note = spacer sequence
  source 1..20: mol_type = other RNA
gtaccactctgaaaatagta

SEQ ID NO: 2756 - RNA, 20 nt, synthetic construct
  misc_feature 1..20: note = spacer sequence
  source 1..20: mol_type = other RNA
tctgcaagctgtgtcggcca

SEQ ID NO: 2757 - RNA, 20 nt, synthetic construct
  misc_feature 1..20: note = spacer sequence
  source 1..20: mol_type = other RNA
gcaagctgtgtcggccacac

SEQ ID NO: 2758 - RNA, 20 nt, synthetic construct
  misc_feature 1..20: note = spacer sequence
  source 1..20: mol_type = other RNA
gccacaccgctaggtggatt

SEQ ID NO: 2759 - RNA, 20 nt, synthetic construct
  misc_feature 1..20: note = spacer sequence
  source 1..20: mol_type = other RNA
acctagcggtgtggccgaca

SEQ ID NO: 2760 - RNA, 20 nt, synthetic construct
  misc_feature 1..20: note = spacer sequence
  source 1..20: mol_type = other RNA
atagtctctatatcctggat

SEQ ID NO: 2761 - RNA, 20 nt, synthetic construct
  misc_feature 1..20: note = spacer sequence
  source 1..20: mol_type = other RNA
ctatatcctggataatgttt

SEQ ID NO: 2762 - RNA, 20 nt, synthetic construct
  misc_feature 1..20: note = spacer sequence
  source 1..20: mol_type = other RNA
atatcctggataatgtttgg

SEQ ID NO: 2763 - RNA, 20 nt, synthetic construct
  misc_feature 1..20: note = spacer sequence
  source 1..20: mol_type = other RNA
tggataatgtttgggtataa

SEQ ID NO: 2764 - RNA, 20 nt, synthetic construct
  misc_feature 1..20: note = spacer sequence
  source 1..20: mol_type = other RNA
aggatatagagactatagaa

SEQ ID NO: 2765 - RNA, 20 nt, synthetic construct
  misc_feature 1..20: note = spacer sequence
  source 1..20: mol_type = other RNA
ttatacccaaacattatcca

SEQ ID NO: 2766 - RNA, 20 nt, synthetic construct
  misc_feature 1..20: note = spacer sequence
  source 1..20: mol_type = other RNA
ttttataggtcattataccc

SEQ ID NO: 2767 - RNA, 20 nt, synthetic construct
  misc_feature 1..20: note = spacer sequence
  source 1..20: mol_type = other RNA
aaattcattttataggtcat

SEQ ID NO: 2768 - RNA, 20 nt, synthetic construct
  misc_feature 1..20: note = spacer sequence
  source 1..20: mol_type = other RNA
agccctccaaattcatttta

SEQ ID NO: 2769 - RNA, 20 nt, synthetic construct
  misc_feature 1..20: note = spacer sequence
  source 1..20: mol_type = other RNA
gttttgaaacaggtactgat

SEQ ID NO: 2770 - RNA, 20 nt, synthetic construct
  misc_feature 1..20: note = spacer sequence
  source 1..20: mol_type = other RNA
aaacagacccatatctagcc

SEQ ID NO: 2771 - RNA, 20 nt, synthetic construct
  misc_feature 1..20: note = spacer sequence
  source 1..20: mol_type = other RNA
gtacctgtttcaaaacagac

SEQ ID NO: 2772 - RNA, 20 nt, synthetic construct
  misc_feature 1..20: note = spacer sequence
  source 1..20: mol_type = other RNA
caccctcttctttctgaaag

SEQ ID NO: 2773 - RNA, 20 nt, synthetic construct
  misc_feature 1..20: note = spacer sequence
  source 1..20: mol_type = other RNA
tctttctgaaagtcctttcc

SEQ ID NO: 2774 - RNA, 20 nt, synthetic construct
  misc_feature 1..20: note = spacer sequence
  source 1..20: mol_type = other RNA
ttctgaaagtcctttccata

SEQ ID NO: 2775 - RNA, 20 nt, synthetic construct
  misc_feature 1..20: note = spacer sequence
  source 1..20: mol_type = other RNA
gaaagtcctttccatagggg

SEQ ID NO: 2776 - RNA, 20 nt, synthetic construct
  misc_feature 1..20: note = spacer sequence
  source 1..20: mol_type = other RNA
gaaagaagagggtgggatca

SEQ ID NO: 2777 - RNA, 20 nt, synthetic construct
  misc_feature 1..20: note = spacer sequence
  source 1..20: mol_type = other RNA
tttccataggggatcagtgt

SEQ ID NO: 2778 - RNA, 20 nt, synthetic construct
  misc_feature 1..20: note = spacer sequence
  source 1..20: mol_type = other RNA
ataggggatcagtgtgtacc

SEQ ID NO: 2779 - RNA, 20 nt, synthetic construct
  misc_feature 1..20: note = spacer sequence
  source 1..20: mol_type = other RNA
cctatggaaaggactttcag

SEQ ID NO: 2780 - RNA, 20 nt, synthetic construct
  misc_feature 1..20: note = spacer sequence
  source 1..20: mol_type = other RNA
gtgtgtaccattcgttcaat

SEQ ID NO: 2781 - RNA, 20 nt, synthetic construct
  misc_feature 1..20: note = spacer sequence
  source 1..20: mol_type = other RNA
ttcaatcagcttcttccaaa

SEQ ID NO: 2782 - RNA, 20 nt, synthetic construct
  misc_feature 1..20: note = spacer sequence
  source 1..20: mol_type = other RNA
atcagcttcttccaaagcat

SEQ ID NO: 2783 - RNA, 20 nt, synthetic construct
  misc_feature 1..20: note = spacer sequence
  source 1..20: mol_type = other RNA
gcttcttccaaagcattcat

SEQ ID NO: 2784 - RNA, 20 nt, synthetic construct
  misc_feature 1..20: note = spacer sequence
  source 1..20: mol_type = other RNA
tccaaagcattcattctgag

SEQ ID NO: 2785 - RNA, 20 nt, synthetic construct
  misc_feature 1..20: note = spacer sequence
  source 1..20: mol_type = other RNA
aaagcattcattctgagatc

SEQ ID NO: 2786 - RNA, 20 nt, synthetic construct
  misc_feature 1..20: note = spacer sequence
  source 1..20: mol_type = other RNA
ttctgagatcaatccctgcc

SEQ ID NO: 2787 - RNA, 20 nt, synthetic construct
  misc_feature 1..20: note = spacer sequence
  source 1..20: mol_type = other RNA
gagatcaatccctgccatcc

SEQ ID NO: 2788 - RNA, 20 nt, synthetic construct
  misc_feature 1..20: note = spacer sequence
  source 1..20: mol_type = other RNA
gaatgaatgctttggaagaa

SEQ ID NO: 2789 - RNA, 20 nt, synthetic construct
  misc_feature 1..20: note = spacer sequence
  source 1..20: mol_type = other RNA
cagaatgaatgctttggaag

SEQ ID NO: 2790 - RNA, 20 nt, synthetic construct
  misc_feature 1..20: note = spacer sequence
  source 1..20: mol_type = other RNA
atccctgccatcctttacat

SEQ ID NO: 2791 - RNA, 20 nt, synthetic construct
  misc_feature 1..20: note = spacer sequence
  source 1..20: mol_type = other RNA
ctgccatcctttacatacca

SEQ ID NO: 2792 - RNA, 20 nt, synthetic construct
  misc_feature 1..20: note = spacer sequence
  source 1..20: mol_type = other RNA
tttacataccagctctgctg

SEQ ID NO: 2793 - RNA, 20 nt, synthetic construct
  misc_feature 1..20: note = spacer sequence
  source 1..20: mol_type = other RNA
gctgcacacagagacctggt

SEQ ID NO: 2794 - RNA, 20 nt, synthetic construct
  misc_feature 1..20: note = spacer sequence
  source 1..20: mol_type = other RNA
gtgtgcagcagagctggtat

SEQ ID NO: 2795 - RNA, 20 nt, synthetic construct
  misc_feature 1..20: note = spacer sequence
  source 1..20: mol_type = other RNA
ctgtgtgcagcagagctggt

SEQ ID NO: 2796 - RNA, 20 nt, synthetic construct
  misc_feature 1..20: note = spacer sequence
  source 1..20: mol_type = other RNA
tttgtacctggttaccaggt

SEQ ID NO: 2797 - RNA, 20 nt, synthetic construct
  misc_feature 1..20: note = spacer sequence
  source 1..20: mol_type = other RNA
gctatgtgatctaagccttg

SEQ ID NO: 2798 - RNA, 20 nt, synthetic construct
  misc_feature 1..20: note = spacer sequence
  source 1..20: mol_type = other RNA
catagcagaaaacattcttt

SEQ ID NO: 2799 - RNA, 20 nt, synthetic construct
  misc_feature 1..20: note = spacer sequence
  source 1..20: mol_type = other RNA
aagccttgctcgggtaaagc

SEQ ID NO: 2800 - RNA, 20 nt, synthetic construct
  misc_feature 1..20: note = spacer sequence
  source 1..20: mol_type = other RNA
ggtaaagcagtaataaagtc

SEQ ID NO: 2801 - RNA, 20 nt, synthetic construct
  misc_feature 1..20: note = spacer sequence
  source 1..20: mol_type = other RNA
tgctgcaacatgggcttcag

SEQ ID NO: 2802 - RNA, 20 nt, synthetic construct
  misc_feature 1..20: note = spacer sequence
  source 1..20: mol_type = other RNA
ggtaagagttgatacgtcca

SEQ ID NO: 2803 - RNA, 20 nt, synthetic construct
  misc_feature 1..20: note = spacer sequence
  source 1..20: mol_type = other RNA
tacctgaagcccatgttgca

SEQ ID NO: 2804 - RNA, 20 nt, synthetic construct
  misc_feature 1..20: note = spacer sequence
  source 1..20: mol_type = other RNA
actcttacctgaagcccatg

SEQ ID NO: 2805 - RNA, 20 nt, synthetic construct
  misc_feature 1..20: note = spacer sequence
  source 1..20: mol_type = other RNA
atggtgataatgacacattc

SEQ ID NO: 2806 - RNA, 20 nt, synthetic construct
  misc_feature 1..20: note = spacer sequence
  source 1..20: mol_type = other RNA
ccatggacgtatcaactctt

SEQ ID NO: 2807 - RNA, 20 nt, synthetic construct
  misc_feature 1..20: note = spacer sequence
  source 1..20: mol_type = other RNA
ttatcaccatggacgtatca

SEQ ID NO: 2808 - RNA, 20 nt, synthetic construct
  misc_feature 1..20: note = spacer sequence
  source 1..20: mol_type = other RNA
tgaaataagatgttccacaa

SEQ ID NO: 2809 - RNA, 20 nt, synthetic construct
  misc_feature 1..20: note = spacer sequence
  source 1..20: mol_type = other RNA
cgaatgtgtcattatcacca

SEQ ID NO: 2810 - RNA, 20 nt, synthetic construct
  misc_feature 1..20: note = spacer sequence
  source 1..20: mol_type = other RNA
tatttcacgaatgtgtcatt

SEQ ID NO: 2811 - RNA, 20 nt, synthetic construct
  misc_feature 1..20: note = spacer sequence
  source 1..20: mol_type = other RNA
acaaattccaactgatctga

SEQ ID NO: 2812 - RNA, 20 nt, synthetic construct
  misc_feature 1..20: note = spacer sequence
  source 1..20: mol_type = other RNA
aactgatctgattcagaccc

SEQ ID NO: 2813 - RNA, 20 nt, synthetic construct
  misc_feature 1..20: note = spacer sequence
  source 1..20: mol_type = other RNA
gttggaatttgtggaacatc

SEQ ID NO: 2814 - RNA, 20 nt, synthetic construct
  misc_feature 1..20: note = spacer sequence
  source 1..20: mol_type = other RNA
gattcagacccctggttaaa

SEQ ID NO: 2815 - RNA, 20 nt, synthetic construct
  misc_feature 1..20: note = spacer sequence
  source 1..20: mol_type = other RNA
gatcagttggaatttgtgga

SEQ ID NO: 2816 - RNA, 20 nt, synthetic construct
  misc_feature 1..20: note = spacer sequence
  source 1..20: mol_type = other RNA
gacccctggttaaaatattg

SEQ ID NO: 2817 - RNA, 20 nt, synthetic construct
  misc_feature 1..20: note = spacer sequence
  source 1..20: mol_type = other RNA
gaatcagatcagttggaatt

SEQ ID NO: 2818 - RNA, 20 nt, synthetic construct
  misc_feature 1..20: note = spacer sequence
  source 1..20: mol_type = other RNA
atattttaaccaggggtctg

SEQ ID NO: 2819 - RNA, 20 nt, synthetic construct
  misc_feature 1..20: note = spacer sequence
  source 1..20: mol_type = other RNA
ttttctttttggtagtttcc

SEQ ID NO: 2820 - RNA, 20 nt, synthetic construct
  misc_feature 1..20: note = spacer sequence
  source 1..20: mol_type = other RNA
ttttggtagtttccttctga

SEQ ID NO: 2821 - RNA, 20 nt, synthetic construct
  misc_feature 1..20: note = spacer sequence
  source 1..20: mol_type = other RNA
ttctgatggcctctttctgg

SEQ ID NO: 2822 - RNA, 20 nt, synthetic construct
  misc_feature 1..20: note = spacer sequence
  source 1..20: mol_type = other RNA
gatggcctctttctggagat

SEQ ID NO: 2823 - RNA, 20 nt, synthetic construct
  misc_feature 1..20: note = spacer sequence
  source 1..20: mol_type = other RNA
gaaggaaactaccaaaaaga

SEQ ID NO: 2824 - RNA, 20 nt, synthetic construct
  misc_feature 1..20: note = spacer sequence
  source 1..20: mol_type = other RNA
ttctggagatgatcacaaat

SEQ ID NO: 2825 - RNA, 20 nt, synthetic construct
  misc_feature 1..20: note = spacer sequence
  source 1..20: mol_type = other RNA
ggagatgatcacaaatgatg

SEQ ID NO: 2826 - RNA, 20 nt, synthetic construct
  misc_feature 1..20: note = spacer sequence
  source 1..20: mol_type = other RNA
agaaagaggccatcagaagg

SEQ ID NO: 2827 - RNA, 20 nt, synthetic construct
  misc_feature 1..20: note = spacer sequence
  source 1..20: mol_type = other RNA
ccagaaagaggccatcagaa

SEQ ID NO: 2828 - RNA, 20 nt, synthetic construct
  misc_feature 1..20: note = spacer sequence
  source 1..20: mol_type = other RNA
tctccagaaagaggccatca

SEQ ID NO: 2829 - RNA, 20 nt, synthetic construct
  misc_feature 1..20: note = spacer sequence
  source 1..20: mol_type = other RNA
caaatgatgttccattactt

SEQ ID NO: 2830 - RNA, 20 nt, synthetic construct
  misc_feature 1..20: note = spacer sequence
  source 1..20: mol_type = other RNA
tttgtgatcatctccagaaa

SEQ ID NO: 2831 - RNA, 20 nt, synthetic construct
  misc_feature 1..20: note = spacer sequence
  source 1..20: mol_type = other RNA
attacttatctgccaaggag

SEQ ID NO: 2832 - RNA, 20 nt, synthetic construct
  misc_feature 1..20: note = spacer sequence
  source 1..20: mol_type = other RNA
gccaaggagtatttttcttt

SEQ ID NO: 2833 - RNA, 20 nt, synthetic construct
  misc_feature 1..20: note = spacer sequence
  source 1..20: mol_type = other RNA
ttggcagataagtaatggaa

SEQ ID NO: 2834 - RNA, 20 nt, synthetic construct
  misc_feature 1..20: note = spacer sequence
  source 1..20: mol_type = other RNA
ttggggacttatcttcatct

SEQ ID NO: 2835 - RNA, 20 nt, synthetic construct
  misc_feature 1..20: note = spacer sequence
  source 1..20: mol_type = other RNA
ccaaagaaaaatactccttg

SEQ ID NO: 2836 - RNA, 20 nt, synthetic construct
  misc_feature 1..20: note = spacer sequence
  source 1..20: mol_type = other RNA
tcatcttgatcttccagaac

SEQ ID NO: 2837 - RNA, 20 nt, synthetic construct
  misc_feature 1..20: note = spacer sequence
  source 1..20: mol_type = other RNA
tcttgatcttccagaactga

SEQ ID NO: 2838 - RNA, 20 nt, synthetic construct
  misc_feature 1..20: note = spacer sequence
  source 1..20: mol_type = other RNA
tgatcttccagaactgaagt

SEQ ID NO: 2839 - RNA, 20 nt, synthetic construct
  misc_feature 1..20: note = spacer sequence
  source 1..20: mol_type = other RNA
agatgaagataagtccccaa

SEQ ID NO: 2840 - RNA, 20 nt, synthetic construct
  misc_feature 1..20: note = spacer sequence
  source 1..20: mol_type = other RNA
tccagaactgaagtgttagt

SEQ ID NO: 2841 - RNA, 20 nt, synthetic construct
  misc_feature 1..20: note = spacer sequence
  source 1..20: mol_type = other RNA
agaactgaagtgttagttcc

SEQ ID NO: 2842 - RNA, 20 nt, synthetic construct
  misc_feature 1..20: note = spacer sequence
  source 1..20: mol_type = other RNA
ggaagatcaagatgaagata

SEQ ID NO: 2843 - RNA, 20 nt, synthetic construct
  misc_feature 1..20: note = spacer sequence
  source 1..20: mol_type = other RNA
gttctggaagatcaagatga

SEQ ID NO: 2844 - RNA, 20 nt, synthetic construct
  misc_feature 1..20: note = spacer sequence
  source 1..20: mol_type = other RNA
acatggctggggaggcctca

SEQ ID NO: 2845 - RNA, 20 nt, synthetic construct
  misc_feature 1..20: note = spacer sequence
  source 1..20: mol_type = other RNA
ccagccatgtggaactaaca

SEQ ID NO: 2846 - RNA, 20 nt, synthetic construct
  misc_feature 1..20: note = spacer sequence
  source 1..20: mol_type = other RNA
taatcacggcagaaggcaag

SEQ ID NO: 2847 - RNA, 20 nt, synthetic construct
  misc_feature 1..20: note = spacer sequence
  source 1..20: mol_type = other RNA
cggcagaaggcaaggaggag

SEQ ID NO: 2848 - RNA, 20 nt, synthetic construct
  misc_feature 1..20: note = spacer sequence
  source 1..20: mol_type = other RNA
gccgtgattatgaggcctcc

SEQ ID NO: 2849 - RNA, 20 nt, synthetic construct
  misc_feature 1..20: note = spacer sequence
  source 1..20: mol_type = other RNA
ttgccttctgccgtgattat

SEQ ID NO: 2850 - RNA, 20 nt, synthetic construct
  misc_feature 1..20: note = spacer sequence
  source 1..20: mol_type = other RNA
tccttgccttctgccgtgat

SEQ ID NO: 2851 - RNA, 20 nt, synthetic construct
  misc_feature 1..20: note = spacer sequence
  source 1..20: mol_type = other RNA
catcttacgtgcaatggcag

SEQ ID NO: 2852 - RNA, 20 nt, synthetic construct
  misc_feature 1..20: note = spacer sequence
  source 1..20: mol_type = other RNA
tacgtgcaatggcagcaagc

SEQ ID NO: 2853 - RNA, 20 nt, synthetic construct
  misc_feature 1..20: note = spacer sequence
  source 1..20: mol_type = other RNA
ttgcttgctgccattgcacg

SEQ ID NO: 2854 - RNA, 20 nt, synthetic construct
  misc_feature 1..20: note = spacer sequence
  source 1..20: mol_type = other RNA
ctttgcttgctgccattgca

SEQ ID NO: 2855 - RNA, 20 nt, synthetic construct
  misc_feature 1..20: note = spacer sequence
  source 1..20: mol_type = other RNA
ctctttgcttgctgccattg

SEQ ID NO: 2856 - RNA, 20 nt, synthetic construct
  misc_feature 1..20: note = spacer sequence
  source 1..20: mol_type = other RNA
ctctctttgcttgctgccat

SEQ ID NO: 2857 - RNA, 20 nt, synthetic construct
  misc_feature 1..20: note = spacer sequence
  source 1..20: mol_type = other RNA
ctgcacaagcttctctctct

SEQ ID NO: 2858 - RNA, 20 nt, synthetic construct
  misc_feature 1..20: note = spacer sequence
  source 1..20: mol_type = other RNA
ccttttttaaaaacatccga

SEQ ID NO: 2859 - RNA, 20 nt, synthetic construct
  misc_feature 1..20: note = spacer sequence
  source 1..20: mol_type = other RNA
gatctcaaccaggtgcggtg

SEQ ID NO: 2860 - RNA, 20 nt, synthetic construct
  misc_feature 1..20: note = spacer sequence
  source 1..20: mol_type = other RNA
gatgtttttaaaaaagggga

SEQ ID NO: 2861 - RNA, 20 nt, synthetic construct
  misc_feature 1..20: note = spacer sequence
  source 1..20: mol_type = other RNA
caaccaggtgcggtggctca

SEQ ID NO: 2862 - RNA, 20 nt, synthetic construct
  misc_feature 1..20: note = spacer sequence
  source 1..20: mol_type = other RNA
accaggtgcggtggctcatg

SEQ ID NO: 2863 - RNA, 20 nt, synthetic construct
  misc_feature 1..20: note = spacer sequence
  source 1..20: mol_type = other RNA
tgcctgtaatcccagcactt

SEQ ID NO: 2864 - RNA, 20 nt, synthetic construct
  misc_feature 1..20: note = spacer sequence
  source 1..20: mol_type = other RNA
cagcactttgggaggccgag

SEQ ID NO: 2865 - RNA, 20 nt, synthetic construct
  misc_feature 1..20: note = spacer sequence
  source 1..20: mol_type = other RNA
caaagtgctgggattacagg

SEQ ID NO: 2866 - RNA, 20 nt, synthetic construct
  misc_feature 1..20: note = spacer sequence
  source 1..20: mol_type = other RNA
gcctcccaaagtgctgggat

SEQ ID NO: 2867 - RNA, 20 nt, synthetic construct
  misc_feature 1..20: note = spacer sequence
  source 1..20: mol_type = other RNA
acccacctcggcctcccaaa

SEQ ID NO: 2868 - RNA, 20 nt, synthetic construct
  misc_feature 1..20: note = spacer sequence
  source 1..20: mol_type = other RNA
cctgaggtcaggagtttgag

SEQ ID NO: 2869 - RNA, 20 nt, synthetic construct
  misc_feature 1..20: note = spacer sequence
  source 1..20: mol_type = other RNA
ggtgatccacccacctcggc

SEQ ID NO: 2870 - RNA, 20 nt, synthetic construct
  misc_feature 1..20: note = spacer sequence
  source 1..20: mol_type = other RNA
ggagtttgagaccagcctga

SEQ ID NO: 2871 - RNA, 20 nt, synthetic construct
  misc_feature 1..20: note = spacer sequence
  source 1..20: mol_type = other RNA
tgacctcaggtgatccaccc

SEQ ID NO: 2872 - RNA, 20 nt, synthetic construct
  misc_feature 1..20: note = spacer sequence
  source 1..20: mol_type = other RNA
aactcctgacctcaggtgat

SEQ ID NO: 2873 - RNA, 20 nt, synthetic construct
  misc_feature 1..20: note = spacer sequence
  source 1..20: mol_type = other RNA
caaactcctgacctcaggtg

SEQ ID NO: 2874 - RNA, 20 nt, synthetic construct
  misc_feature 1..20: note = spacer sequence
  source 1..20: mol_type = other RNA
ggctggtctcaaactcctga

SEQ ID NO: 2875 - RNA, 20 nt, synthetic construct
  misc_feature 1..20: note = spacer sequence
  source 1..20: mol_type = other RNA
attggtcaggctggtctcaa

SEQ ID NO: 2876 - RNA, 20 nt, synthetic construct
  misc_feature 1..20: note = spacer sequence
  source 1..20: mol_type = other RNA
ccattggtcaggctggtctc

SEQ ID NO: 2877 - RNA, 20 nt, synthetic construct
  misc_feature 1..20: note = spacer sequence
  source 1..20: mol_type = other RNA
ctactaaaaatacaaaatta

SEQ ID NO: 2878 - RNA, 20 nt, synthetic construct
  misc_feature 1..20: note = spacer sequence
  source 1..20: mol_type = other RNA
actaaaaatacaaaattagc

SEQ ID NO: 2879 - RNA, 20 nt, synthetic construct
  misc_feature 1..20: note = spacer sequence
  source 1..20: mol_type = other RNA
cagcaacttgggaggctgag

SEQ ID NO: 2880 - RNA, 20 nt, synthetic construct
  misc_feature 1..20: note = spacer sequence
  source 1..20: mol_type = other RNA
caagttgctgggattacagg

SEQ ID NO: 2881 - RNA, 20 nt, synthetic construct
  misc_feature 1..20: note = spacer sequence
  source 1..20: mol_type = other RNA
gcctcccaagttgctgggat

SEQ ID NO: 2882 - RNA, 20 nt, synthetic construct
  misc_feature 1..20: note = spacer sequence
  source 1..20: mol_type = other RNA
tgcctcagcctcccaagttg

SEQ ID NO: 2883 - RNA, 20 nt, synthetic construct
  misc_feature 1..20: note = spacer sequence
  source 1..20: mol_type = other RNA
cctgcctcagcctcccaagt

SEQ ID NO: 2884 - RNA, 20 nt, synthetic construct
  misc_feature 1..20: note = spacer sequence
  source 1..20: mol_type = other RNA
cttgaacttgggagatagag

SEQ ID NO: 2885 - RNA, 20 nt, synthetic construct
  misc_feature 1..20: note = spacer sequence
  source 1..20: mol_type = other RNA
agcgattctcctgcctcagc

SEQ ID NO: 2886 - RNA, 20 nt, synthetic construct
  misc_feature 1..20: note = spacer sequence
  source 1..20: mol_type = other RNA
caagttcaagcgattctcct

SEQ ID NO: 2887 - RNA, 20 nt, synthetic construct
  misc_feature 1..20: note = spacer sequence
  source 1..20: mol_type = other RNA
cccaagttcaagcgattctc

SEQ ID NO: 2888 - RNA, 20 nt, synthetic construct
  misc_feature 1..20: note = spacer sequence
  source 1..20: mol_type = other RNA
atctcccaagttcaagcgat

SEQ ID NO: 2889 - RNA, 20 nt, synthetic construct
  misc_feature 1..20: note = spacer sequence
  source 1..20: mol_type = other RNA
ctgcaacctctatctcccaa

SEQ ID NO: 2890 - RNA, 20 nt, synthetic construct
  misc_feature 1..20: note = spacer sequence
  source 1..20: mol_type = other RNA
tggctcactgcaacctctat

SEQ ID NO: 2891 - RNA, 20 nt, synthetic construct
  misc_feature 1..20: note = spacer sequence
  source 1..20: mol_type = other RNA
agcctgggtgacagagtgag

SEQ ID NO: 2892 - RNA, 20 nt, synthetic construct
  misc_feature 1..20: note = spacer sequence
  source 1..20: mol_type = other RNA
cccaggctggagtgcagtgg

SEQ ID NO: 2893 - RNA, 20 nt, synthetic construct
  misc_feature 1..20: note = spacer sequence
  source 1..20: mol_type = other RNA
gtcacccaggctggagtgca

SEQ ID NO: 2894 - RNA, 20 nt, synthetic construct
  misc_feature 1..20: note = spacer sequence
  source 1..20: mol_type = other RNA
ctctgtcacccaggctggag

SEQ ID NO: 2895 - RNA, 20 nt, synthetic construct
  misc_feature 1..20: note = spacer sequence
  source 1..20: mol_type = other RNA
cactctgtcacccaggctgg

SEQ ID NO: 2896 - RNA, 20 nt, synthetic construct
  misc_feature 1..20: note = spacer sequence
  source 1..20: mol_type = other RNA
atctcaaaaaaaaaaaaaaa

SEQ ID NO: 2897 - RNA, 20 nt, synthetic construct
  misc_feature 1..20: note = spacer sequence
  source 1..20: mol_type = other RNA
caaaaaaaaaaaaaaaaatt

SEQ ID NO: 2898 - RNA, 20 nt, synthetic construct
  misc_feature 1..20: note = spacer sequence
  source 1..20: mol_type = other RNA
aaaaaaaaaaaaaaaattac

SEQ ID NO: 2899 - RNA, 20 nt, synthetic construct
  misc_feature 1..20: note = spacer sequence
  source 1..20: mol_type = other RNA
caattaagaaaaacaattaa

SEQ ID NO: 2900 - RNA, 20 nt, synthetic construct
  misc_feature 1..20: note = spacer sequence
  source 1..20: mol_type = other RNA
taattgtgaatatgtattac

SEQ ID NO: 2901 - RNA, 20 nt, synthetic construct
  misc_feature 1..20: note = spacer sequence
  source 1..20: mol_type = other RNA
atttaattgtttttcttaat

SEQ ID NO: 2902 - RNA, 20 nt, synthetic construct
  misc_feature 1..20: note = spacer sequence
  source 1..20: mol_type = other RNA
tttttctatttaattgtttt

SEQ ID NO: 2903 - RNA, 20 nt, synthetic construct
  misc_feature 1..20: note = spacer sequence
  source 1..20: mol_type = other RNA
tttttgctcttttttctatt

SEQ ID NO: 2904 - RNA, 20 nt, synthetic construct
  misc_feature 1..20: note = spacer sequence
  source 1..20: mol_type = other RNA
cagctacttgggaggctgag

SEQ ID NO: 2905 - RNA, 20 nt, synthetic construct
  misc_feature 1..20: note = spacer sequence
  source 1..20: mol_type = other RNA
caagtagctgggattacagg

SEQ ID NO: 2906 - RNA, 20 nt, synthetic construct
  misc_feature 1..20: note = spacer sequence
  source 1..20: mol_type = other RNA
gcctcccaagtagctgggat

SEQ ID NO: 2907 - RNA, 20 nt, synthetic construct
  misc_feature 1..20: note = spacer sequence
  source 1..20: mol_type = other RNA
acctcagcctcccaagtagc

SEQ ID NO: 2908 - RNA, 20 nt, synthetic construct
  misc_feature 1..20: note = spacer sequence
  source 1..20: mol_type = other RNA
agcaatttttctacctcagc

SEQ ID NO: 2909 - RNA, 20 nt, synthetic construct
  misc_feature 1..20: note = spacer sequence
  source 1..20: mol_type = other RNA
tgggttcaagcaatttttct

SEQ ID NO: 2910 - RNA, 20 nt, synthetic construct
  misc_feature 1..20: note = spacer sequence
  source 1..20: mol_type = other RNA
acctcctgggttcaagcaat

SEQ ID NO: 2911 - RNA, 20 nt, synthetic construct
  misc_feature 1..20: note = spacer sequence
  source 1..20: mol_type = other RNA
ctgcaacctccacctcctgg

SEQ ID NO: 2912 - RNA, 20 nt, synthetic construct
  misc_feature 1..20: note = spacer sequence
  source 1..20: mol_type = other RNA
gctcactgcaacctccacct

SEQ ID NO: 2913 - RNA, 20 nt, synthetic construct
  misc_feature 1..20: note = spacer sequence
  source 1..20: mol_type = other RNA
cagctcactgcaacctccac

SEQ ID NO: 2914 - RNA, 20 nt, synthetic construct
  misc_feature 1..20: note = spacer sequence
  source 1..20: mol_type = other RNA
agcctgggcaacaagagcga

SEQ ID NO: 2915 - RNA, 20 nt, synthetic construct
  misc_feature 1..20: note = spacer sequence
  source 1..20: mol_type = other RNA
tgttgcccaggctggagtgc

SEQ ID NO: 2916 - RNA, 20 nt, synthetic construct
  misc_feature 1..20: note = spacer sequence
  source 1..20: mol_type = other RNA
ctcttgttgcccaggctgga

SEQ ID NO: 2917 - RNA, 20 nt, synthetic construct
  misc_feature 1..20: note = spacer sequence
  source 1..20: mol_type = other RNA
tctcaaaagaagaagaagaa

SEQ ID NO: 2918 - RNA, 20 nt, synthetic construct
  misc_feature 1..20: note = spacer sequence
  source 1..20: mol_type = other RNA
caaaagaagaagaagaagac

SEQ ID NO: 2919 - RNA, 20 nt, synthetic construct
  misc_feature 1..20: note = spacer sequence
  source 1..20: mol_type = other RNA
aaagaagaagaagaagacaa

SEQ ID NO: 2920 - RNA, 20 nt, synthetic construct
  misc_feature 1..20: note = spacer sequence
  source 1..20: mol_type = other RNA
tttgagatgaagtttcgctc

SEQ ID NO: 2921 - RNA, 20 nt, synthetic construct
  misc_feature 1..20: note = spacer sequence
  source 1..20: mol_type = other RNA
tcttttgagatgaagtttcg

SEQ ID NO: 2922 - RNA, 20 nt, synthetic construct
  misc_feature 1..20: note = spacer sequence
  source 1..20: mol_type = other RNA
tcttcttttgagatgaagtt

SEQ ID NO: 2923 - RNA, 20 nt, synthetic construct
  misc_feature 1..20: note = spacer sequence
  source 1..20: mol_type = other RNA
tcttcttcttttgagatgaa

SEQ ID NO: 2924 - RNA, 20 nt, synthetic construct
  misc_feature 1..20: note = spacer sequence
  source 1..20: mol_type = other RNA
tcttcttcttcttttgagat

SEQ ID NO: 2925 - RNA, 20 nt, synthetic construct
  misc_feature 1..20: note = spacer sequence
  source 1..20: mol_type = other RNA
ttgtcttcttcttcttcttt

SEQ ID NO: 2926 - RNA, 20 nt, synthetic construct
  misc_feature 1..20: note = spacer sequence
  source 1..20: mol_type = other RNA
gttctttgtcttcttcttct

SEQ ID NO: 2927 - RNA, 20 nt, synthetic construct
  misc_feature 1..20: note = spacer sequence
  source 1..20: mol_type = other RNA
ctgttctttgtcttcttctt

SEQ ID NO: 2928 - RNA, 20 nt, synthetic construct
  misc_feature 1..20: note = spacer sequence
  source 1..20: mol_type = other RNA
ttctccttcccataactccc

SEQ ID NO: 2929 - RNA, 20 nt, synthetic construct
  misc_feature 1..20: note = spacer sequence
  source 1..20: mol_type = other RNA
ccttcccataactccccctc

SEQ ID NO: 2930 - RNA, 20 nt, synthetic construct
  misc_feature 1..20: note = spacer sequence
  source 1..20: mol_type = other RNA
ttcccataactccccctcgc

SEQ ID NO: 2931 - RNA, 20 nt, synthetic construct
  misc_feature 1..20: note = spacer sequence
  source 1..20: mol_type = other RNA
cataactccccctcgcaggc

SEQ ID NO: 2932 - RNA, 20 nt, synthetic construct
  misc_feature 1..20: note = spacer sequence
  source 1..20: mol_type = other RNA
ccctcgcaggcctgccttcc

SEQ ID NO: 2933 - RNA, 20 nt, synthetic construct
  misc_feature 1..20: note = spacer sequence
  source 1..20: mol_type = other RNA
caggcctgccttccgctagc

SEQ ID NO: 2934 - RNA, 20 nt, synthetic construct
  misc_feature 1..20: note = spacer sequence
  source 1..20: mol_type = other RNA
gctagccatctcctggactt

SEQ ID NO: 2935 - RNA, 20 nt, synthetic construct
  misc_feature 1..20: note = spacer sequence
  source 1..20: mol_type = other RNA
cctggacttcctcaggcttg

SEQ ID NO: 2936 - RNA, 20 nt, synthetic construct
  misc_feature 1..20: note = spacer sequence
  source 1..20: mol_type = other RNA
tggacttcctcaggcttgac

SEQ ID NO: 2937 - RNA, 20 nt, synthetic construct
  misc_feature 1..20: note = spacer sequence
  source 1..20: mol_type = other RNA
aggagatggctagcggaagg

SEQ ID NO: 2938 - RNA, 20 nt, synthetic construct
  misc_feature 1..20: note = spacer sequence
  source 1..20: mol_type = other RNA
tcaggcttgaccctggcatc

SEQ ID NO: 2939 - RNA, 20 nt, synthetic construct
  misc_feature 1..20: note = spacer sequence
  source 1..20: mol_type = other RNA
ggcttgaccctggcatccag

SEQ ID NO: 2940 - RNA, 20 nt, synthetic construct
  misc_feature 1..20: note = spacer sequence
  source 1..20: mol_type = other RNA
agcctgaggaagtccaggag

SEQ ID NO: 2941 - RNA, 20 nt, synthetic construct
  misc_feature 1..20: note = spacer sequence
  source 1..20: mol_type = other RNA
agggtttctcccttactggc

SEQ ID NO: 2942 - RNA, 20 nt, synthetic construct
  misc_feature 1..20: note = spacer sequence
  source 1..20: mol_type = other RNA
cccttactggcaggcaacac

SEQ ID NO: 2943 - RNA, 20 nt, synthetic construct
  misc_feature 1..20: note = spacer sequence
  source 1..20: mol_type = other RNA
cttactggcaggcaacaccc

SEQ ID NO: 2944 - RNA, 20 nt, synthetic construct
  misc_feature 1..20: note = spacer sequence
  source 1..20: mol_type = other RNA
aggtgggcttctttggaagc

SEQ ID NO: 2945 - RNA, 20 nt, synthetic construct
  misc_feature 1..20: note = spacer sequence
  source 1..20: mol_type = other RNA
ttggaagcagagttacttgc

SEQ ID NO: 2946 - RNA, 20 nt, synthetic construct
  misc_feature 1..20: note = spacer sequence
  source 1..20: mol_type = other RNA
aaagaagcccacctggaatg

SEQ ID NO: 2947 - RNA, 20 nt, synthetic construct
  misc_feature 1..20: note = spacer sequence
  source 1..20: mol_type = other RNA
gcttccaaagaagcccacct

SEQ ID NO: 2948 - RNA, 20 nt, synthetic construct
  misc_feature 1..20: note = spacer sequence
  source 1..20: mol_type = other RNA
aggcaagtaactctgcttcc

SEQ ID NO: 2949 - RNA, 20 nt, synthetic construct
  misc_feature 1..20: note = spacer sequence
  source 1..20: mol_type = other RNA
aactcaaggcaagtaactct

SEQ ID NO: 2950 - RNA, 20 nt, synthetic construct
  misc_feature 1..20: note = spacer sequence
  source 1..20: mol_type = other RNA
accccacccctccaactcaa

SEQ ID NO: 2951 - RNA, 20 nt, synthetic construct
  misc_feature 1..20: note = spacer sequence
  source 1..20: mol_type = other RNA
tcccttccccacaagctaac

SEQ ID NO: 2952 - RNA, 20 nt, synthetic construct
  misc_feature 1..20: note = spacer sequence
  source 1..20: mol_type = other RNA
cttccccacaagctaaccac

SEQ ID NO: 2953 - RNA, 20 nt, synthetic construct
  misc_feature 1..20: note = spacer sequence
  source 1..20: mol_type = other RNA
ccacaagctaaccacactct

SEQ ID NO: 2954 - RNA, 20 nt, synthetic construct
  misc_feature 1..20: note = spacer sequence
  source 1..20: mol_type = other RNA
tcacagaaaggattgctctg

SEQ ID NO: 2955 - RNA, 20 nt, synthetic construct
  misc_feature 1..20: note = spacer sequence
  source 1..20: mol_type = other RNA
cagaaaggattgctctgatg

SEQ ID NO: 2956 - RNA, 20 nt, synthetic construct
  misc_feature 1..20: note = spacer sequence
  source 1..20: mol_type = other RNA
gtgaagagtgtggttagctt

SEQ ID NO: 2957 - RNA, 20 nt, synthetic construct
  misc_feature 1..20: note = spacer sequence
  source 1..20: mol_type = other RNA
tttctgtgaagagtgtggtt

SEQ ID NO: 2958 - RNA, 20 nt, synthetic construct
  misc_feature 1..20: note = spacer sequence
  source 1..20: mol_type = other RNA
gatgtgcctatggatcctcc

SEQ ID NO: 2959 - RNA, 20 nt, synthetic construct
  misc_feature 1..20: note = spacer sequence
  source 1..20: mol_type = other RNA
gagcaatcctttctgtgaag

SEQ ID NO: 2960 - RNA, 20 nt, synthetic construct
  misc_feature 1..20: note = spacer sequence
  source 1..20: mol_type = other RNA
ataggcacatcagagcaatc

SEQ ID NO: 2961 - RNA, 20 nt, synthetic construct
  misc_feature 1..20: note = spacer sequence
  source 1..20: mol_type = other RNA
tccctttccccttgacagcc

SEQ ID NO: 2962 - RNA, 20 nt, synthetic construct
  misc_feature 1..20: note = spacer sequence
  source 1..20: mol_type = other RNA
ctttccccttgacagcctgc

SEQ ID NO: 2963 - RNA, 20 nt, synthetic construct
  misc_feature 1..20: note = spacer sequence
  source 1..20: mol_type = other RNA
ccttgacagcctgcaggaaa

SEQ ID NO: 2964 - RNA, 20 nt, synthetic construct
  misc_feature 1..20: note = spacer sequence
  source 1..20: mol_type = other RNA
aggggaaagggaggatccat

SEQ ID NO: 2965 - RNA, 20 nt, synthetic construct
  misc_feature 1..20: note = spacer sequence
  source 1..20: mol_type = other RNA
tgcaggctgtcaaggggaaa

SEQ ID NO: 2966 - RNA, 20 nt, synthetic construct
  misc_feature 1..20: note = spacer sequence
  source 1..20: mol_type = other RNA
tttcctgcaggctgtcaagg

SEQ ID NO: 2967 - RNA, 20 nt, synthetic construct
  misc_feature 1..20: note = spacer sequence
  source 1..20: mol_type = other RNA
aggtcagagaattggtcctg

SEQ ID NO: 2968 - RNA, 20 nt, synthetic construct
  misc_feature 1..20: note = spacer sequence
  source 1..20: mol_type = other RNA
gagaattggtcctgccacct

SEQ ID NO: 2969 - RNA, 20 nt, synthetic construct
  misc_feature 1..20: note = spacer sequence
  source 1..20: mol_type = other RNA
gacctggaacccattccttt

SEQ ID NO: 2970 - RNA, 20 nt, synthetic construct
  misc_feature 1..20: note = spacer sequence
  source 1..20: mol_type = other RNA
ctgacctggaacccattcct

SEQ ID NO: 2971 - RNA, 20 nt, synthetic construct
  misc_feature 1..20: note = spacer sequence
  source 1..20: mol_type = other RNA
tgccacctcttagcaagtta

SEQ ID NO: 2972 - RNA, 20 nt, synthetic construct
  misc_feature 1..20: note = spacer sequence
  source 1..20: mol_type = other RNA
tagcaagttatgtggggttg

SEQ ID NO: 2973 - RNA, 20 nt, synthetic construct
  misc_feature 1..20: note = spacer sequence
  source 1..20: mol_type = other RNA
tcactttgaaatgtcagcgg

SEQ ID NO: 2974 - RNA, 20 nt, synthetic construct
  misc_feature 1..20: note = spacer sequence
  source 1..20: mol_type = other RNA
ctttgaaatgtcagcggctt

SEQ ID NO: 2975 - RNA, 20 nt, synthetic construct
  misc_feature 1..20: note = spacer sequence
  source 1..20: mol_type = other RNA
aagtgaggagtaaaggcaac

SEQ ID NO: 2976 - RNA, 20 nt, synthetic construct
  misc_feature 1..20: note = spacer sequence
  source 1..20: mol_type = other RNA
gcggcttgtcacttgtcact

SEQ ID NO: 2977 - RNA, 20 nt, synthetic construct
  misc_feature 1..20: note = spacer sequence
  source 1..20: mol_type = other RNA
cttgtcacttatattctcgg

SEQ ID NO: 2978 - RNA, 20 nt, synthetic construct
  misc_feature 1..20: note = spacer sequence
  source 1..20: mol_type = other RNA
cttatattctcggtttgagg

SEQ ID NO: 2979 - RNA, 20 nt, synthetic construct
  misc_feature 1..20: note = spacer sequence
  source 1..20: mol_type = other RNA
cggtttgaggcttcagctga

SEQ ID NO: 2980 - RNA, 20 nt, synthetic construct
  misc_feature 1..20: note = spacer sequence
  source 1..20: mol_type = other RNA
gtttgaggcttcagctgaca

SEQ ID NO: 2981 - RNA, 20 nt, synthetic construct
  misc_feature 1..20: note = spacer sequence
  source 1..20: mol_type = other RNA
aaccgagaatataagtgaca

SEQ ID NO: 2982 - RNA, 20 nt, synthetic construct
  misc_feature 1..20: note = spacer sequence
  source 1..20: mol_type = other RNA
gctgacatcctcagacaaga

SEQ ID NO: 2983 - RNA, 20 nt, synthetic construct
  misc_feature 1..20: note = spacer sequence
  source 1..20: mol_type = other RNA
gctgaagcctcaaaccgaga

SEQ ID NO: 2984 - RNA, 20 nt, synthetic construct
  misc_feature 1..20: note = spacer sequence
  source 1..20: mol_type = other RNA
tcagacaagagtctgttatg

SEQ ID NO: 2985 - RNA, 20 nt, synthetic construct
  misc_feature 1..20: note = spacer sequence
  source 1..20: mol_type = other RNA
gacaagagtctgttatggtc

SEQ ID NO: 2986 - RNA, 20 nt, synthetic construct
  misc_feature 1..20: note = spacer sequence
  source 1..20: mol_type = other RNA
gaggatgtcagctgaagcct

SEQ ID NO: 2987 - RNA, 20 nt, synthetic construct
  misc_feature 1..20: note = spacer sequence
  source 1..20: mol_type = other RNA
tgtctgaggatgtcagctga

SEQ ID NO: 2988 - RNA, 20 nt, synthetic construct
  misc_feature 1..20: note = spacer sequence
  source 1..20: mol_type = other RNA
gttatggtctttcaaatcta

SEQ ID NO: 2989 - RNA, 20 nt, synthetic construct
  misc_feature 1..20: note = spacer sequence
  source 1..20: mol_type = other RNA
ttcaaatctaggggtccgta

SEQ ID NO: 2990 - RNA, 20 nt, synthetic construct
  misc_feature 1..20: note = spacer sequence
  source 1..20: mol_type = other RNA
aatctaggggtccgtagatt

SEQ ID NO: 2991 - RNA, 20 nt, synthetic construct
  misc_feature 1..20: note = spacer sequence
  source 1..20: mol_type = other RNA
aggggtccgtagattgacca

SEQ ID NO: 2992 - RNA, 20 nt, synthetic construct
  misc_feature 1..20: note = spacer sequence
  source 1..20: mol_type = other RNA
gtagattgaccacctaagac

SEQ ID NO: 2993 - RNA, 20 nt, synthetic construct
  misc_feature 1..20: note = spacer sequence
  source 1..20: mol_type = other RNA
acggacccctagatttgaaa

SEQ ID NO: 2994 - RNA, 20 nt, synthetic construct
  misc_feature 1..20: note = spacer sequence
  source 1..20: mol_type = other RNA
atctacggacccctagattt

SEQ ID NO: 2995 - RNA, 20 nt, synthetic construct
  misc_feature 1..20: note = spacer sequence
  source 1..20: mol_type = other RNA
taggtggtcaatctacggac

SEQ ID NO: 2996 - RNA, 20 nt, synthetic construct
  misc_feature 1..20: note = spacer sequence
  source 1..20: mol_type = other RNA
cagtggccatttcatagttg

SEQ ID NO: 2997 - RNA, 20 nt, synthetic construct
  misc_feature 1..20: note = spacer sequence
  source 1..20: mol_type = other RNA
tagttggctcactctttctc

SEQ ID NO: 2998 - RNA, 20 nt, synthetic construct
  misc_feature 1..20: note = spacer sequence
  source 1..20: mol_type = other RNA
ctctttctccagcatgaacg

SEQ ID NO: 2999 - RNA, 20 nt, synthetic construct
  misc_feature 1..20: note = spacer sequence
  source 1..20: mol_type = other RNA
ttctccagcatgaacgtgac

SEQ ID NO: 3000 - RNA, 20 nt, synthetic construct
  misc_feature 1..20: note = spacer sequence
  source 1..20: mol_type = other RNA
ccagcatgaacgtgacatga

SEQ ID NO: 3001 - RNA, 20 nt, synthetic construct
  misc_feature 1..20: note = spacer sequence
  source 1..20: mol_type = other RNA
agcatgaacgtgacatgatc

SEQ ID NO: 3002 - RNA, 20 nt, synthetic construct
  misc_feature 1..20: note = spacer sequence
  source 1..20: mol_type = other RNA
tgctggagaaagagtgagcc

SEQ ID NO: 3003 - RNA, 20 nt, synthetic construct
  misc_feature 1..20: note = spacer sequence
  source 1..20: mol_type = other RNA
cgttcatgctggagaaagag

SEQ ID NO: 3004 - RNA, 20 nt, synthetic construct
  misc_feature 1..20: note = spacer sequence
  source 1..20: mol_type = other RNA
tgtcacgttcatgctggaga

SEQ ID NO: 3005 - RNA, 20 nt, synthetic construct
  misc_feature 1..20: note = spacer sequence
  source 1..20: mol_type = other RNA
aaattatgactgcccttcat

SEQ ID NO: 3006 - RNA, 20 nt, synthetic construct
  misc_feature 1..20: note = spacer sequence
  source 1..20: mol_type = other RNA
taattttgatcatgtcacgt

SEQ ID NO: 3007 - RNA, 20 nt, synthetic construct
  misc_feature 1..20: note = spacer sequence
  source 1..20: mol_type = other RNA
taagggtcattctggctgcc

SEQ ID NO: 3008 - RNA, 20 nt, synthetic construct
  misc_feature 1..20: note = spacer sequence
  source 1..20: mol_type = other RNA
ttctggctgccctaaaggga

SEQ ID NO: 3009 - RNA, 20 nt, synthetic construct
  misc_feature 1..20: note = spacer sequence
  source 1..20: mol_type = other RNA
ggctgccctaaagggacttt

SEQ ID NO: 3010 - RNA, 20 nt, synthetic construct
  misc_feature 1..20: note = spacer sequence
  source 1..20: mol_type = other RNA
ctttagggcagccagaatga

SEQ ID NO: 3011 - RNA, 20 nt, synthetic construct
  misc_feature 1..20: note = spacer sequence
  source 1..20: mol_type = other RNA
ctggcttccatgcctactca

SEQ ID NO: 3012 - RNA, 20 nt, synthetic construct
  misc_feature 1..20: note = spacer sequence
  source 1..20: mol_type = other RNA
ggcttccatgcctactcaat

SEQ ID NO: 3013 - RNA, 20 nt, synthetic construct
  misc_feature 1..20: note = spacer sequence
  source 1..20: mol_type = other RNA
atgcctactcaattagaaac

SEQ ID NO: 3014 - RNA, 20 nt, synthetic construct
  misc_feature 1..20: note = spacer sequence
  source 1..20: mol_type = other RNA
attagaaactttccatcttt

SEQ ID NO: 3015 - RNA, 20 nt, synthetic construct
  misc_feature 1..20: note = spacer sequence
  source 1..20: mol_type = other RNA
aattgagtaggcatggaagc

SEQ ID NO: 3016 - RNA, 20 nt, synthetic construct
  misc_feature 1..20: note = spacer sequence
  source 1..20: mol_type = other RNA
atctttgtccagttttaaca

SEQ ID NO: 3017 - RNA, 20 nt, synthetic construct
  misc_feature 1..20: note = spacer sequence
  source 1..20: mol_type = other RNA
ttgtccagttttaacagact

SEQ ID NO: 3018 - RNA, 20 nt, synthetic construct
  misc_feature 1..20: note = spacer sequence
  source 1..20: mol_type = other RNA
agttttaacagactgagatc

SEQ ID NO: 3019 - RNA, 20 nt, synthetic construct
  misc_feature 1..20: note = spacer sequence
  source 1..20: mol_type = other RNA
gttaaaactggacaaagatg

SEQ ID NO: 3020 - RNA, 20 nt, synthetic construct
  misc_feature 1..20: note = spacer sequence
  source 1..20: mol_type = other RNA
gtctgttaaaactggacaaa

SEQ ID NO: 3021 - RNA, 20 nt, synthetic construct
  misc_feature 1..20: note = spacer sequence
  source 1..20: mol_type = other RNA
cagtctgttaaaactggaca

SEQ ID NO: 3022 - RNA, 20 nt, synthetic construct
  misc_feature 1..20: note = spacer sequence
  source 1..20: mol_type = other RNA
tggccaagcctaaaatctga

SEQ ID NO: 3023 - RNA, 20 nt, synthetic construct
  misc_feature 1..20: note = spacer sequence
  source 1..20: mol_type = other RNA
gaggttctcacctatcatct

SEQ ID NO: 3024 - RNA, 20 nt, synthetic construct
  misc_feature 1..20: note = spacer sequence
  source 1..20: mol_type = other RNA
gattttaggcttggccaaga

SEQ ID NO: 3025 - RNA, 20 nt, synthetic construct
  misc_feature 1..20: note = spacer sequence
  source 1..20: mol_type = other RNA
cacctatcatctccatgaat

SEQ ID NO: 3026 - RNA, 20 nt, synthetic construct
  misc_feature 1..20: note = spacer sequence
  source 1..20: mol_type = other RNA
cctatcatctccatgaatga

SEQ ID NO: 3027 - RNA, 20 nt, synthetic construct
  misc_feature 1..20: note = spacer sequence
  source 1..20: mol_type = other RNA
tctccatgaatgaacaacaa

SEQ ID NO: 3028 - RNA, 20 nt, synthetic construct
  misc_feature 1..20: note = spacer sequence
  source 1..20: mol_type = other RNA
ccatgaatgaacaacaaata

SEQ ID NO: 3029 - RNA, 20 nt, synthetic construct
  misc_feature 1..20: note = spacer sequence
  source 1..20: mol_type = other RNA
atgaatgaacaacaaatact

SEQ ID NO: 3030 - RNA, 20 nt, synthetic construct
  misc_feature 1..20: note = spacer sequence
  source 1..20: mol_type = other RNA
tggagatgataggtgagaac

SEQ ID NO: 3031 - RNA, 20 nt, synthetic construct
  misc_feature 1..20: note = spacer sequence
  source 1..20: mol_type = other RNA
ttcatggagatgataggtga

SEQ ID NO: 3032 - RNA, 20 nt, synthetic construct
  misc_feature 1..20: note = spacer sequence
  source 1..20: mol_type = other RNA
gcaaagtaggtagtatttgt

SEQ ID NO: 3033 - RNA, 20 nt, synthetic construct
  misc_feature 1..20: note = spacer sequence
  source 1..20: mol_type = other RNA
atgactcaaatatcctttca

SEQ ID NO: 3034 - RNA, 20 nt, synthetic construct
  misc_feature 1..20: note = spacer sequence
  source 1..20: mol_type = other RNA
tagaaatcagcaaagtaggt

SEQ ID NO: 3035 - RNA, 20 nt, synthetic construct
  misc_feature 1..20: note = spacer sequence
  source 1..20: mol_type = other RNA
aatatcctttcattagcaaa

SEQ ID NO: 3036 - RNA, 20 nt, synthetic construct
  misc_feature 1..20: note = spacer sequence
  source 1..20: mol_type = other RNA
tttcattagcaaaatgcgga

SEQ ID NO: 3037 - RNA, 20 nt, synthetic construct
  misc_feature 1..20: note = spacer sequence
  source 1..20: mol_type = other RNA
ttagcaaaatgcggaattac

SEQ ID NO: 3038 - RNA, 20 nt, synthetic construct
  misc_feature 1..20: note = spacer sequence
  source 1..20: mol_type = other RNA
gcattttgctaatgaaagga

SEQ ID NO: 3039 - RNA, 20 nt, synthetic construct
  misc_feature 1..20: note = spacer sequence
  source 1..20: mol_type = other RNA
gtaattccgcattttgctaa

SEQ ID NO: 3040 - RNA, 20 nt, synthetic construct
  misc_feature 1..20: note = spacer sequence
  source 1..20: mol_type = other RNA
attctgtaattccgcatttt

SEQ ID NO: 3041 - RNA, 20 nt, synthetic construct
  misc_feature 1..20: note = spacer sequence
  source 1..20: mol_type = other RNA
aaacaaaatgcaagctgctt

SEQ ID NO: 3042 - RNA, 20 nt, synthetic construct
  misc_feature 1..20: note = spacer sequence
  source 1..20: mol_type = other RNA
atatcaaaacaaaatgcaag

SEQ ID NO: 3043 - RNA, 20 nt, synthetic construct
  misc_feature 1..20: note = spacer sequence
  source 1..20: mol_type = other RNA
tcaaatatttattagagttg

SEQ ID NO: 3044 - RNA, 20 nt, synthetic construct
  misc_feature 1..20: note = spacer sequence
  source 1..20: mol_type = other RNA
aatatttattagagttgact

SEQ ID NO: 3045 - RNA, 20 nt, synthetic construct
  misc_feature 1..20: note = spacer sequence
  source 1..20: mol_type = other RNA
aataaatatttgatgaataa

SEQ ID NO: 3046 - RNA, 20 nt, synthetic construct
  misc_feature 1..20: note = spacer sequence
  source 1..20: mol_type = other RNA
actctaataaatatttgatg

SEQ ID NO: 3047 - RNA, 20 nt, synthetic construct
  misc_feature 1..20: note = spacer sequence
  source 1..20: mol_type = other RNA
gtgctggcactatgcctgga

SEQ ID NO: 3048 - RNA, 20 nt, synthetic construct
  misc_feature 1..20: note = spacer sequence
  source 1..20: mol_type = other RNA
aggcatagtgccagcacaga

SEQ ID NO: 3049 - RNA, 20 nt, synthetic construct
  misc_feature 1..20: note = spacer sequence
  source 1..20: mol_type = other RNA
agtccaggcatagtgccagc

SEQ ID NO: 3050 - RNA, 20 nt, synthetic construct
  misc_feature 1..20: note = spacer sequence
  source 1..20: mol_type = other RNA
ttattaaacctccagtccag

SEQ ID NO: 3051 - RNA, 20 nt, synthetic construct
  misc_feature 1..20: note = spacer sequence
  source 1..20: mol_type = other RNA
tgttcattattaaacctcca

SEQ ID NO: 3052 - RNA, 20 nt, synthetic construct
  misc_feature 1..20: note = spacer sequence
  source 1..20: mol_type = other RNA
aatttaaccttgcctgtctt

SEQ ID NO: 3053 - RNA, 20 nt, synthetic construct
  misc_feature 1..20: note = spacer sequence
  source 1..20: mol_type = other RNA
tcaaatttaaccttgcctgt

SEQ ID NO: 3054 - RNA, 20 nt, synthetic construct
  misc_feature 1..20: note = spacer sequence
  source 1..20: mol_type = other RNA
ggcctttcgtcaaatttaac

SEQ ID NO: 3055 - RNA, 20 nt, synthetic construct
  misc_feature 1..20: note = spacer sequence
  source 1..20: mol_type = other RNA
ccgcatctggcctttcgtca

SEQ ID NO: 3056 - RNA, 20 nt, synthetic construct
  misc_feature 1..20: note = spacer sequence
  source 1..20: mol_type = other RNA
tgcctgtaatcctagcactt

SEQ ID NO: 3057 - RNA, 20 nt, synthetic construct
  misc_feature 1..20: note = spacer sequence
  source 1..20: mol_type = other RNA
tagcactttgagaggccaag

SEQ ID NO: 3058 - RNA, 20 nt, synthetic construct
  misc_feature 1..20: note = spacer sequence
  source 1..20: mol_type = other RNA
aagtgctaggattacaggca

SEQ ID NO: 3059 - RNA, 20 nt, synthetic construct
  misc_feature 1..20: note = spacer sequence
  source 1..20: mol_type = other RNA
caaagtgctaggattacagg

SEQ ID NO: 3060 - RNA, 20 nt, synthetic construct
  misc_feature 1..20: note = spacer sequence
  source 1..20: mol_type = other RNA
acccgccttggcctctcaaa

SEQ ID NO: 3061 - RNA, 20 nt, synthetic construct
  misc_feature 1..20: note = spacer sequence
  source 1..20: mol_type = other RNA
cttaagcccaggagctcgag

SEQ ID NO: 3062 - RNA, 20 nt, synthetic construct
  misc_feature 1..20: note = spacer sequence
  source 1..20: mol_type = other RNA
tgggcttaagcgatccaccc

SEQ ID NO: 3063 - RNA, 20 nt, synthetic construct
  misc_feature 1..20: note = spacer sequence
  source 1..20: mol_type = other RNA
agacctgcctgggcaacatg

SEQ ID NO: 3064 - RNA, 20 nt, synthetic construct
  misc_feature 1..20: note = spacer sequence
  source 1..20: mol_type = other RNA
agctcctgggcttaagcgat

SEQ ID NO: 3065 - RNA, 20 nt, synthetic construct
  misc_feature 1..20: note = spacer sequence
  source 1..20: mol_type = other RNA
cgagctcctgggcttaagcg

SEQ ID NO: 3066 - RNA, 20 nt, synthetic construct
  misc_feature 1..20: note = spacer sequence
  source 1..20: mol_type = other RNA
tgccatgttgcccaggcagg

SEQ ID NO: 3067 - RNA, 20 nt, synthetic construct
  misc_feature 1..20: note = spacer sequence
  source 1..20: mol_type = other RNA
tctctacaaaaaatacaaaa

SEQ ID NO: 3068 - RNA, 20 nt, synthetic construct
  misc_feature 1..20: note = spacer sequence
  source 1..20: mol_type = other RNA
ctacaaaaaatacaaaaatt

SEQ ID NO: 3069 - RNA, 20 nt, synthetic construct
  misc_feature 1..20: note = spacer sequence
  source 1..20: mol_type = other RNA
acaaaaaatacaaaaattag

SEQ ID NO: 3070 - RNA, 20 nt, synthetic construct
  misc_feature 1..20: note = spacer sequence
  source 1..20: mol_type = other RNA
cagctacttggaagactgag

SEQ ID NO: 3071 - RNA, 20 nt, synthetic construct
  misc_feature 1..20: note = spacer sequence
  source 1..20: mol_type = other RNA
aagtagctgggactacaggc

SEQ ID NO: 3072 - RNA, 20 nt, synthetic construct
  misc_feature 1..20: note = spacer sequence
  source 1..20: mol_type = other RNA
tccaagtagctgggactaca

SEQ ID NO: 3073 - RNA, 20 nt, synthetic construct
  misc_feature 1..20: note = spacer sequence
  source 1..20: mol_type = other RNA
gtcttccaagtagctgggac

SEQ ID NO: 3074 - RNA, 20 nt, synthetic construct
  misc_feature 1..20: note = spacer sequence
  source 1..20: mol_type = other RNA
cacctcagtcttccaagtag

SEQ ID NO: 3075 - RNA, 20 nt, synthetic construct
  misc_feature 1..20: note = spacer sequence
  source 1..20: mol_type = other RNA
tttaagtctgggaggcagtg

SEQ ID NO: 3076 - RNA, 20 nt, synthetic construct
  misc_feature 1..20: note = spacer sequence
  source 1..20: mol_type = other RNA
gggaggcagtgagctgagac

SEQ ID NO: 3077 - RNA, 20 nt, synthetic construct
  misc_feature 1..20: note = spacer sequence
  source 1..20: mol_type = other RNA
cagacttaaaggaacttccc

SEQ ID NO: 3078 - RNA, 20 nt, synthetic construct
  misc_feature 1..20: note = spacer sequence
  source 1..20: mol_type = other RNA
ctgcctcccagacttaaagg

SEQ ID NO: 3079 - RNA, 20 nt, synthetic construct
  misc_feature 1..20: note = spacer sequence
  source 1..20: mol_type = other RNA
gctcactgcctcccagactt

SEQ ID NO: 3080 - RNA, 20 nt, synthetic construct
  misc_feature 1..20: note = spacer sequence
  source 1..20: mol_type = other RNA
cagctcactgcctcccagac

SEQ ID NO: 3081 - RNA, 20 nt, synthetic construct
  misc_feature 1..20: note = spacer sequence
  source 1..20: mol_type = other RNA
agcctgggagacagagtgag

SEQ ID NO: 3082 - RNA, 20 nt, synthetic construct
  misc_feature 1..20: note = spacer sequence
  source 1..20: mol_type = other RNA
caggctggagtgcagtggca

SEQ ID NO: 3083 - RNA, 20 nt, synthetic construct
  misc_feature 1..20: note = spacer sequence
  source 1..20: mol_type = other RNA
cccaggctggagtgcagtgg

SEQ ID NO: 3084 - RNA, 20 nt, synthetic construct
  misc_feature 1..20: note = spacer sequence
  source 1..20: mol_type = other RNA
gtctcccaggctggagtgca

SEQ ID NO: 3085 - RNA, 20 nt, synthetic construct
  misc_feature 1..20: note = spacer sequence
  source 1..20: mol_type = other RNA
ctctgtctcccaggctggag

SEQ ID NO: 3086 - RNA, 20 nt, synthetic construct
  misc_feature 1..20: note = spacer sequence
  source 1..20: mol_type = other RNA
cactctgtctcccaggctgg

SEQ ID NO: 3087 - RNA, 20 nt, synthetic construct
  misc_feature 1..20: note = spacer sequence
  source 1..20: mol_type = other RNA
caaaaaacaaatggacaaaa

SEQ ID NO: 3088 - RNA, 20 nt, synthetic construct
  misc_feature 1..20: note = spacer sequence
  source 1..20: mol_type = other RNA
aaaaacaaatggacaaaaga

SEQ ID NO: 3089 - RNA, 20 nt, synthetic construct
  misc_feature 1..20: note = spacer sequence
  source 1..20: mol_type = other RNA
atttgttttttgagacaagg

SEQ ID NO: 3090 - RNA, 20 nt, synthetic construct
  misc_feature 1..20: note = spacer sequence
  source 1..20: mol_type = other RNA
tttgtccatttgttttttga

SEQ ID NO: 3091 - RNA, 20 nt, synthetic construct
  misc_feature 1..20: note = spacer sequence
  source 1..20: mol_type = other RNA
caggggtatcttttgtccat

SEQ ID NO: 3092 - RNA, 20 nt, synthetic construct
  misc_feature 1..20: note = spacer sequence
  source 1..20: mol_type = other RNA
gttctggaggaaaaaattct

SEQ ID NO: 3093 - RNA, 20 nt, synthetic construct
  misc_feature 1..20: note = spacer sequence
  source 1..20: mol_type = other RNA
ggaggaaaaaattctctagg

SEQ ID NO: 3094 - RNA, 20 nt, synthetic construct
  misc_feature 1..20: note = spacer sequence
  source 1..20: mol_type = other RNA
agaactgaaagctagctcac

SEQ ID NO: 3095 - RNA, 20 nt, synthetic construct
  misc_feature 1..20: note = spacer sequence
  source 1..20: mol_type = other RNA
tccagaactgaaagctagct

SEQ ID NO: 3096 - RNA, 20 nt, synthetic construct
  misc_feature 1..20: note = spacer sequence
  source 1..20: mol_type = other RNA
ctaggaactgaaaatcttaa

SEQ ID NO: 3097 - RNA, 20 nt, synthetic construct
  misc_feature 1..20: note = spacer sequence
  source 1..20: mol_type = other RNA
aggaactgaaaatcttaact

SEQ ID NO: 3098 - RNA, 20 nt, synthetic construct
  misc_feature 1..20: note = spacer sequence
  source 1..20: mol_type = other RNA
tagagaattttttcctccag

SEQ ID NO: 3099 - RNA, 20 nt, synthetic construct
  misc_feature 1..20: note = spacer sequence
  source 1..20: mol_type = other RNA
gttcctagagaattttttcc

SEQ ID NO: 3100 - RNA, 20 nt, synthetic construct
  misc_feature 1..20: note = spacer sequence
  source 1..20: mol_type = other RNA
taacttagtctccatgataa

SEQ ID NO: 3101 - RNA, 20 nt, synthetic construct
  misc_feature 1..20: note = spacer sequence
  source 1..20: mol_type = other RNA
ccatgataactgaatcttac

SEQ ID NO: 3102 - RNA, 20 nt, synthetic construct
  misc_feature 1..20: note = spacer sequence
  source 1..20: mol_type = other RNA
atgataactgaatcttacct

SEQ ID NO: 3103 - RNA, 20 nt, synthetic construct
  misc_feature 1..20: note = spacer sequence
  source 1..20: mol_type = other RNA
tggagactaagttaagattt

SEQ ID NO: 3104 - RNA, 20 nt, synthetic construct
  misc_feature 1..20: note = spacer sequence
  source 1..20: mol_type = other RNA
gttatcatggagactaagtt

SEQ ID NO: 3105 - RNA, 20 nt, synthetic construct
  misc_feature 1..20: note = spacer sequence
  source 1..20: mol_type = other RNA
tacctcttgtaaaatttgcc

SEQ ID NO: 3106 - RNA, 20 nt, synthetic construct
  misc_feature 1..20: note = spacer sequence
  source 1..20: mol_type = other RNA
tgtaaaatttgccttaatag

SEQ ID NO: 3107 - RNA, 20 nt, synthetic construct
  misc_feature 1..20: note = spacer sequence
  source 1..20: mol_type = other RNA
aacataaaaattttaaatgc

SEQ ID NO: 3108 - RNA, 20 nt, synthetic construct
  misc_feature 1..20: note = spacer sequence
  source 1..20: mol_type = other RNA
ttttggaactcgggttccaa

SEQ ID NO: 3109 - RNA, 20 nt, synthetic construct
  misc_feature 1..20: note = spacer sequence
  source 1..20: mol_type = other RNA
aaaatgaaataaaataaatc

SEQ ID NO: 3110 - RNA, 20 nt, synthetic construct
  misc_feature 1..20: note = spacer sequence
  source 1..20: mol_type = other RNA
ggttccaaaggtagatttaa

SEQ ID NO: 3111 - RNA, 20 nt, synthetic construct
  misc_feature 1..20: note = spacer sequence
  source 1..20: mol_type = other RNA
aaaggtagatttaatcatac

SEQ ID NO: 3112 - RNA, 20 nt, synthetic construct
  misc_feature 1..20: note = spacer sequence
  source 1..20: mol_type = other RNA
acctttggaacccgagttcc

SEQ ID NO: 3113 - RNA, 20 nt, synthetic construct
  misc_feature 1..20: note = spacer sequence
  source 1..20: mol_type = other RNA
ggtgaggatatgaagaaact

SEQ ID NO: 3114 - RNA, 20 nt, synthetic construct
  misc_feature 1..20: note = spacer sequence
  source 1..20: mol_type = other RNA
tttgtctgataatagccatc

SEQ ID NO: 3115 - RNA, 20 nt, synthetic construct
  misc_feature 1..20: note = spacer sequence
  source 1..20: mol_type = other RNA
gataatagccatcctgacag

SEQ ID NO: 3116 - RNA, 20 nt, synthetic construct
  misc_feature 1..20: note = spacer sequence
  source 1..20: mol_type = other RNA
gacaaaagacaaaaagctct

SEQ ID NO: 3117 - RNA, 20 nt, synthetic construct
  misc_feature 1..20: note = spacer sequence
  source 1..20: mol_type = other RNA
tgacaggtgtaaggtgatat

SEQ ID NO: 3118 - RNA, 20 nt, synthetic construct
  misc_feature 1..20: note = spacer sequence
  source 1..20: mol_type = other RNA
ggatggctattatcagacaa

SEQ ID NO: 3119 - RNA, 20 nt, synthetic construct
  misc_feature 1..20: note = spacer sequence
  source 1..20: mol_type = other RNA
ccttacacctgtcaggatgg

SEQ ID NO: 3120 - RNA, 20 nt, synthetic construct
  misc_feature 1..20: note = spacer sequence
  source 1..20: mol_type = other RNA
cattgtggtttggatttgca

SEQ ID NO: 3121 - RNA, 20 nt, synthetic construct
  misc_feature 1..20: note = spacer sequence
  source 1..20: mol_type = other RNA
ttgtggtttggatttgcatt

SEQ ID NO: 3122 - RNA, 20 nt, synthetic construct
  misc_feature 1..20: note = spacer sequence
  source 1..20: mol_type = other RNA
aaaccacaatgagatatcac

SEQ ID NO: 3123 - RNA, 20 nt, synthetic construct
  misc_feature 1..20: note = spacer sequence
  source 1..20: mol_type = other RNA
ttgatggttagtgacatagt

SEQ ID NO: 3124 - RNA, 20 nt, synthetic construct
  misc_feature 1..20: note = spacer sequence
  source 1..20: mol_type = other RNA
aagaaatgcaaatccaaacc

SEQ ID NO: 3125 - RNA, 20 nt, synthetic construct
  misc_feature 1..20: note = spacer sequence
  source 1..20: mol_type = other RNA
ctaaccatcaaagaaatgca

SEQ ID NO: 3126 - RNA, 20 nt, synthetic construct
  misc_feature 1..20: note = spacer sequence
  source 1..20: mol_type = other RNA
aaactatgtcactaaccatc

SEQ ID NO: 3127 - RNA, 20 nt, synthetic construct
  misc_feature 1..20: note = spacer sequence
  source 1..20: mol_type = other RNA
ccactcaaatctcaggttga

SEQ ID NO: 3128 - RNA, 20 nt, synthetic construct
  misc_feature 1..20: note = spacer sequence
  source 1..20: mol_type = other RNA
aatctcaggttgaattgtaa

SEQ ID NO: 3129 - RNA, 20 nt, synthetic construct
  misc_feature 1..20: note = spacer sequence
  source 1..20: mol_type = other RNA
caggttgaattgtaatcccc

SEQ ID NO: 3130 - RNA, 20 nt, synthetic construct
  misc_feature 1..20: note = spacer sequence
  source 1..20: mol_type = other RNA
ggttgaattgtaatccccaa

SEQ ID NO: 3131 - RNA, 20 nt, synthetic construct
  misc_feature 1..20: note = spacer sequence
  source 1..20: mol_type = other RNA
acctgagatttgagtgggga

SEQ ID NO: 3132 - RNA, 20 nt, synthetic construct
  misc_feature 1..20: note = spacer sequence
  source 1..20: mol_type = other RNA
ccaatgctggaggtggggcc

SEQ ID NO: 3133 - RNA, 20 nt, synthetic construct
  misc_feature 1..20: note = spacer sequence
  source 1..20: mol_type = other RNA
agcattggggattacaattc

SEQ ID NO: 3134 - RNA, 20 nt, synthetic construct
  misc_feature 1..20: note = spacer sequence
  source 1..20: mol_type = other RNA
tcaaaatagtaaatgaggtc

SEQ ID NO: 3135 - RNA, 20 nt, synthetic construct
  misc_feature 1..20: note = spacer sequence
  source 1..20: mol_type = other RNA
aaatagtaaatgaggtctca

SEQ ID NO: 3136 - RNA, 20 nt, synthetic construct
  misc_feature 1..20: note = spacer sequence
  source 1..20: mol_type = other RNA
tttactattttgaagatagc

SEQ ID NO: 3137 - RNA, 20 nt, synthetic construct
  misc_feature 1..20: note = spacer sequence
  source 1..20: mol_type = other RNA
cacaggatctggttgtgtgg

SEQ ID NO: 3138 - RNA, 20 nt, synthetic construct
  misc_feature 1..20: note = spacer sequence
  source 1..20: mol_type = other RNA
caggatctggttgtgtggct

SEQ ID NO: 3139 - RNA, 20 nt, synthetic construct
  misc_feature 1..20: note = spacer sequence
  source 1..20: mol_type = other RNA
tgtgagacctcatttactat

SEQ ID NO: 3140 - RNA, 20 nt, synthetic construct
  misc_feature 1..20: note = spacer sequence
  source 1..20: mol_type = other RNA
ggttgtgtggctttgggagg

SEQ ID NO: 3141 - RNA, 20 nt, synthetic construct
  misc_feature 1..20: note = spacer sequence
  source 1..20: mol_type = other RNA
caaagccacacaaccagatc

SEQ ID NO: 3142 - RNA, 20 nt, synthetic construct
  misc_feature 1..20: note = spacer sequence
  source 1..20: mol_type = other RNA
accaccccagcctcccaaag

SEQ ID NO: 3143 - RNA, 20 nt, synthetic construct
  misc_feature 1..20: note = spacer sequence
  source 1..20: mol_type = other RNA
cttgagcccaggagtttgag

SEQ ID NO: 3144 - RNA, 20 nt, synthetic construct
  misc_feature 1..20: note = spacer sequence
  source 1..20: mol_type = other RNA
tgagcccaggagtttgagac

SEQ ID NO: 3145 - RNA, 20 nt, synthetic construct
  misc_feature 1..20: note = spacer sequence
  source 1..20: mol_type = other RNA
agagatccaccaccccagcc

SEQ ID NO: 3146 - RNA, 20 nt, synthetic construct
  misc_feature 1..20: note = spacer sequence
  source 1..20: mol_type = other RNA
tgggctcaagagatccacca

SEQ ID NO: 3147 - RNA, 20 nt, synthetic construct
  misc_feature 1..20: note = spacer sequence
  source 1..20: mol_type = other RNA
aactcctgggctcaagagat

SEQ ID NO: 3148 - RNA, 20 nt, synthetic construct
  misc_feature 1..20: note = spacer sequence
  source 1..20: mol_type = other RNA
caaactcctgggctcaagag

SEQ ID NO: 3149 - RNA, 20 nt, synthetic construct
  misc_feature 1..20: note = spacer sequence
  source 1..20: mol_type = other RNA
ccatgttgcccaggctggtc

SEQ ID NO: 3150 - RNA, 20 nt, synthetic construct
  misc_feature 1..20: note = spacer sequence
  source 1..20: mol_type = other RNA
ctgcagccttgacttccctg

SEQ ID NO: 3151 - RNA, 20 nt, synthetic construct
  misc_feature 1..20: note = spacer sequence
  source 1..20: mol_type = other RNA
gctcactgcagccttgactt

SEQ ID NO: 3152 - RNA, 20 nt, synthetic construct
  misc_feature 1..20: note = spacer sequence
  source 1..20: mol_type = other RNA
cggctcactgcagccttgac

SEQ ID NO: 3153 - RNA, 20 nt, synthetic construct
  misc_feature 1..20: note = spacer sequence
  source 1..20: mol_type = other RNA
tgccactgcactccagcctg

SEQ ID NO: 3154 - RNA, 20 nt, synthetic construct
  misc_feature 1..20: note = spacer sequence
  source 1..20: mol_type = other RNA
agcctgggtgacagagcaag

SEQ ID NO: 3155 - RNA, 20 nt, synthetic construct
  misc_feature 1..20: note = spacer sequence
  source 1..20: mol_type = other RNA
cccaggctggagtgcagtgg

SEQ ID NO: 3156 - RNA, 20 nt, synthetic construct
  misc_feature 1..20: note = spacer sequence
  source 1..20: mol_type = other RNA
gtcacccaggctggagtgca

SEQ ID NO: 3157 - RNA, 20 nt, synthetic construct
  misc_feature 1..20: note = spacer sequence
  source 1..20: mol_type = other RNA
tgctctgtcacccaggctgg

SEQ ID NO: 3158 - RNA, 20 nt, synthetic construct
  misc_feature 1..20: note = spacer sequence
  source 1..20: mol_type = other RNA
aaaaaaaaaaaaattgtgtg

SEQ ID NO: 3159 - RNA, 20 nt, synthetic construct
  misc_feature 1..20: note = spacer sequence
  source 1..20: mol_type = other RNA
taagactgggttatatataa

SEQ ID NO: 3160 - RNA, 20 nt, synthetic construct
  misc_feature 1..20: note = spacer sequence
  source 1..20: mol_type = other RNA
ttatagtagtgcaagaacag

SEQ ID NO: 3161 - RNA, 20 nt, synthetic construct
  misc_feature 1..20: note = spacer sequence
  source 1..20: mol_type = other RNA
tgcactactataaagaaatc

SEQ ID NO: 3162 - RNA, 20 nt, synthetic construct
  misc_feature 1..20: note = spacer sequence
  source 1..20: mol_type = other RNA
ctaattgtgtaaggctgttc

SEQ ID NO: 3163 - RNA, 20 nt, synthetic construct
  misc_feature 1..20: note = spacer sequence
  source 1..20: mol_type = other RNA
gtcactaattgtgtaaggct

SEQ ID NO: 3164 - RNA, 20 nt, synthetic construct
  misc_feature 1..20: note = spacer sequence
  source 1..20: mol_type = other RNA
ttctgttgggcatttggatg

SEQ ID NO: 3165 - RNA, 20 nt, synthetic construct
  misc_feature 1..20: note = spacer sequence
  source 1..20: mol_type = other RNA
gttgggcatttggatggctt

SEQ ID NO: 3166 - RNA, 20 nt, synthetic construct
  misc_feature 1..20: note = spacer sequence
  source 1..20: mol_type = other RNA
aaatgcccaacagaaagaca

SEQ ID NO: 3167 - RNA, 20 nt, synthetic construct
  misc_feature 1..20: note = spacer sequence
  source 1..20: mol_type = other RNA
ttggagaactgtctattcaa

SEQ ID NO: 3168 - RNA, 20 nt, synthetic construct
  misc_feature 1..20: note = spacer sequence
  source 1..20: mol_type = other RNA
aaagaagccatccaaatgcc

SEQ ID NO: 3169 - RNA, 20 nt, synthetic construct
  misc_feature 1..20: note = spacer sequence
  source 1..20: mol_type = other RNA
ccaaagaagccatccaaatg

SEQ ID NO: 3170 - RNA, 20 nt, synthetic construct
  misc_feature 1..20: note = spacer sequence
  source 1..20: mol_type = other RNA
attcaagtctttagcccatt

SEQ ID NO: 3171 - RNA, 20 nt, synthetic construct
  misc_feature 1..20: note = spacer sequence
  source 1..20: mol_type = other RNA
agtctttagcccattttaaa

SEQ ID NO: 3172 - RNA, 20 nt, synthetic construct
  misc_feature 1..20: note = spacer sequence
  source 1..20: mol_type = other RNA
ttagcccattttaaaattgg

SEQ ID NO: 3173 - RNA, 20 nt, synthetic construct
  misc_feature 1..20: note = spacer sequence
  source 1..20: mol_type = other RNA
ttattttttttgctatcaag

SEQ ID NO: 3174 - RNA, 20 nt, synthetic construct
  misc_feature 1..20: note = spacer sequence
  source 1..20: mol_type = other RNA
agttgtaggtagtccctatg

SEQ ID NO: 3175 - RNA, 20 nt, synthetic construct
  misc_feature 1..20: note = spacer sequence
  source 1..20: mol_type = other RNA
ctatgtattttggaaattat

SEQ ID NO: 3176 - RNA, 20 nt, synthetic construct
  misc_feature 1..20: note = spacer sequence
  source 1..20: mol_type = other RNA
tgctattagtcttggcagcg

SEQ ID NO: 3177 - RNA, 20 nt, synthetic construct
  misc_feature 1..20: note = spacer sequence
  source 1..20: mol_type = other RNA
tcatgctattagtcttggca

SEQ ID NO: 3178 - RNA, 20 nt, synthetic construct
  misc_feature 1..20: note = spacer sequence
  source 1..20: mol_type = other RNA
cctatgtgttcttctacgag

SEQ ID NO: 3179 - RNA, 20 nt, synthetic construct
  misc_feature 1..20: note = spacer sequence
  source 1..20: mol_type = other RNA
tctacgagttttatagttta

SEQ ID NO: 3180 - RNA, 20 nt, synthetic construct
  misc_feature 1..20: note = spacer sequence
  source 1..20: mol_type = other RNA
acgagttttatagtttaggt

SEQ ID NO: 3181 - RNA, 20 nt, synthetic construct
  misc_feature 1..20: note = spacer sequence
  source 1..20: mol_type = other RNA
tagaagaacacataggggaa

SEQ ID NO: 3182 - RNA, 20 nt, synthetic construct
  misc_feature 1..20: note = spacer sequence
  source 1..20: mol_type = other RNA
aatatttaagtctttaatcc

SEQ ID NO: 3183 - RNA, 20 nt, synthetic construct
  misc_feature 1..20: note = spacer sequence
  source 1..20: mol_type = other RNA
ttaatccatttttagttgat

SEQ ID NO: 3184 - RNA, 20 nt, synthetic construct
  misc_feature 1..20: note = spacer sequence
  source 1..20: mol_type = other RNA
atttttagttgatttttggg

SEQ ID NO: 3185 - RNA, 20 nt, synthetic construct
  misc_feature 1..20: note = spacer sequence
  source 1..20: mol_type = other RNA
actaaaaatggattaaagac

SEQ ID NO: 3186 - RNA, 20 nt, synthetic construct
  misc_feature 1..20: note = spacer sequence
  source 1..20: mol_type = other RNA
caaaaatcaactaaaaatgg

SEQ ID NO: 3187 - RNA, 20 nt, synthetic construct
  misc_feature 1..20: note = spacer sequence
  source 1..20: mol_type = other RNA
cagccttaatttacactatc

SEQ ID NO: 3188 - RNA, 20 nt, synthetic construct
  misc_feature 1..20: note = spacer sequence
  source 1..20: mol_type = other RNA
ttcttttagatgtgaatatc

SEQ ID NO: 3189 - RNA, 20 nt, synthetic construct
  misc_feature 1..20: note = spacer sequence
  source 1..20: mol_type = other RNA
tttagatgtgaatatccagt

SEQ ID NO: 3190 - RNA, 20 nt, synthetic construct
  misc_feature 1..20: note = spacer sequence
  source 1..20: mol_type = other RNA
ggaagtgtgatgccttcagc

SEQ ID NO: 3191 - RNA, 20 nt, synthetic construct
  misc_feature 1..20: note = spacer sequence
  source 1..20: mol_type = other RNA
tgattacaaaatattttaca

SEQ ID NO: 3192 - RNA, 20 nt, synthetic construct
  misc_feature 1..20: note = spacer sequence
  source 1..20: mol_type = other RNA
cacttcctgattacaaaata

SEQ ID NO: 3193 - RNA, 20 nt, synthetic construct
  misc_feature 1..20: note = spacer sequence
  source 1..20: mol_type = other RNA
gctttgctcttcattttcaa

SEQ ID NO: 3194 - RNA, 20 nt, synthetic construct
  misc_feature 1..20: note = spacer sequence
  source 1..20: mol_type = other RNA
tcattttcaagattagtttg

SEQ ID NO: 3195 - RNA, 20 nt, synthetic construct
  misc_feature 1..20: note = spacer sequence
  source 1..20: mol_type = other RNA
ttttcaagattagtttggct

SEQ ID NO: 3196 - RNA, 20 nt, synthetic construct
  misc_feature 1..20: note = spacer sequence
  source 1..20: mol_type = other RNA
agattagtttggctatttgg

SEQ ID NO: 3197 - RNA, 20 nt, synthetic construct
  misc_feature 1..20: note = spacer sequence
  source 1..20: mol_type = other RNA
tgaaaatgaagagcaaagct

SEQ ID NO: 3198 - RNA, 20 nt, synthetic construct
  misc_feature 1..20: note = spacer sequence
  source 1..20: mol_type = other RNA
tttttggcctcacatgaatt

SEQ ID NO: 3199 - RNA, 20 nt, synthetic construct
  misc_feature 1..20: note = spacer sequence
  source 1..20: mol_type = other RNA
catgaattttagaattgctt

SEQ ID NO: 3200 - RNA, 20 nt, synthetic construct
  misc_feature 1..20: note = spacer sequence
  source 1..20: mol_type = other RNA
tgtgaggccaaaaaagaccc

SEQ ID NO: 3201 - RNA, 20 nt, synthetic construct
  misc_feature 1..20: note = spacer sequence
  source 1..20: mol_type = other RNA
aaaattcatgtgaggccaaa

SEQ ID NO: 3202 - RNA, 20 nt, synthetic construct
  misc_feature 1..20: note = spacer sequence
  source 1..20: mol_type = other RNA
aaactgcaatggcatttttt

SEQ ID NO: 3203 - RNA, 20 nt, synthetic construct
  misc_feature 1..20: note = spacer sequence
  source 1..20: mol_type = other RNA
ctatcaaaactgcaatggca

SEQ ID NO: 3204 - RNA, 20 nt, synthetic construct
  misc_feature 1..20: note = spacer sequence
  source 1..20: mol_type = other RNA
atctgtagatgactttgggt

SEQ ID NO: 3205 - RNA, 20 nt, synthetic construct
  misc_feature 1..20: note = spacer sequence
  source 1..20: mol_type = other RNA
gtagatgactttgggtagca

SEQ ID NO: 3206 - RNA, 20 nt, synthetic construct
  misc_feature 1..20: note = spacer sequence
  source 1..20: mol_type = other RNA
acagattgaatgcattccct

SEQ ID NO: 3207 - RNA, 20 nt, synthetic construct
  misc_feature 1..20: note = spacer sequence
  source 1..20: mol_type = other RNA
tctacagattgaatgcattc

SEQ ID NO: 3208 - RNA, 20 nt, synthetic construct
  misc_feature 1..20: note = spacer sequence
  source 1..20: mol_type = other RNA
aatgctacccaaagtcatct

SEQ ID NO: 3209 - RNA, 20 nt, synthetic construct
  misc_feature 1..20: note = spacer sequence
  source 1..20: mol_type = other RNA
aatccatgaccatgggaagt

SEQ ID NO: 3210 - RNA, 20 nt, synthetic construct
  misc_feature 1..20: note = spacer sequence
  source 1..20: mol_type = other RNA
atgaccatgggaagtctttc

SEQ ID NO: 3211 - RNA, 20 nt, synthetic construct
  misc_feature 1..20: note = spacer sequence
  source 1..20: mol_type = other RNA
tggattagaaaacttaatgt

SEQ ID NO: 3212 - RNA, 20 nt, synthetic construct
  misc_feature 1..20: note = spacer sequence
  source 1..20: mol_type = other RNA
catggtcatggattagaaaa

SEQ ID NO: 3213 - RNA, 20 nt, synthetic construct
  misc_feature 1..20: note = spacer sequence
  source 1..20: mol_type = other RNA
ttccatttatttggatcttc

SEQ ID NO: 3214 - RNA, 20 nt, synthetic construct
  misc_feature 1..20: note = spacer sequence
  source 1..20: mol_type = other RNA
atttatttggatcttcttca

SEQ ID NO: 3215 - RNA, 20 nt, synthetic construct
  misc_feature 1..20: note = spacer sequence
  source 1..20: mol_type = other RNA
aaataaatggaaagacttcc

SEQ ID NO: 3216 - RNA, 20 nt, synthetic construct
  misc_feature 1..20: note = spacer sequence
  source 1..20: mol_type = other RNA
tcttcaatttcatttatcaa

SEQ ID NO: 3217 - RNA, 20 nt, synthetic construct
  misc_feature 1..20: note = spacer sequence
  source 1..20: mol_type = other RNA
taaatattgaacggggtctt

SEQ ID NO: 3218 - RNA, 20 nt, synthetic construct
  misc_feature 1..20: note = spacer sequence
  source 1..20: mol_type = other RNA
atatttaggaacaaatttaa

SEQ ID NO: 3219 - RNA, 20 nt, synthetic construct
  misc_feature 1..20: note = spacer sequence
  source 1..20: mol_type = other RNA
tgctatgttgcctaggctgg

SEQ ID NO: 3220 - RNA, 20 nt, synthetic construct
  misc_feature 1..20: note = spacer sequence
  source 1..20: mol_type = other RNA
tgaactcctgagctcaagcg

SEQ ID NO: 3221 - RNA, 20 nt, synthetic construct
  misc_feature 1..20: note = spacer sequence
  source 1..20: mol_type = other RNA
agaccagcctaggcaacata

SEQ ID NO: 3222 - RNA, 20 nt, synthetic construct
  misc_feature 1..20: note = spacer sequence
  source 1..20: mol_type = other RNA
tgagctcaagcgatactccc

SEQ ID NO: 3223 - RNA, 20 nt, synthetic construct
  misc_feature 1..20: note = spacer sequence
  source 1..20: mol_type = other RNA
ggagttcaagaccagcctag

SEQ ID NO: 3224 - RNA, 20 nt, synthetic construct
  misc_feature 1..20: note = spacer sequence
  source 1..20: mol_type = other RNA
agcgatactcccacctcagc

SEQ ID NO: 3225 - RNA, 20 nt, synthetic construct
  misc_feature 1..20: note = spacer sequence
  source 1..20: mol_type = other RNA
cttgagctcaggagttcaag

SEQ ID NO: 3226 - RNA, 20 nt, synthetic construct
  misc_feature 1..20: note = spacer sequence
  source 1..20: mol_type = other RNA
cacctcagcctttgtgacct

SEQ ID NO: 3227 - RNA, 20 nt, synthetic construct
  misc_feature 1..20: note = spacer sequence
  source 1..20: mol_type = other RNA
gcctttgtgacctgcccgcc

SEQ ID NO: 3228 - RNA, 20 nt, synthetic construct
  misc_feature 1..20: note = spacer sequence
  source 1..20: mol_type = other RNA
caaaggctgaggtgggagta

SEQ ID NO: 3229 - RNA, 20 nt, synthetic construct
  misc_feature 1..20: note = spacer sequence
  source 1..20: mol_type = other RNA
gcctcccaaagtgctgggat

SEQ ID NO: 3230 - RNA, 20 nt, synthetic construct
  misc_feature 1..20: note = spacer sequence
  source 1..20: mol_type = other RNA
caaagtgctgggattacagg

SEQ ID NO: 3231 - RNA, 20 nt, synthetic construct
  misc_feature 1..20: note = spacer sequence
  source 1..20: mol_type = other RNA
caggttcacgccacttcttc

SEQ ID NO: 3232 - RNA, 20 nt, synthetic construct
  misc_feature 1..20: note = spacer sequence
  source 1..20: mol_type = other RNA
cgccacttcttctagttttt

SEQ ID NO: 3233 - RNA, 20 nt, synthetic construct
  misc_feature 1..20: note = spacer sequence
  source 1..20: mol_type = other RNA
tctagttttttgagatgtaa

SEQ ID NO: 3234 - RNA, 20 nt, synthetic construct
  misc_feature 1..20: note = spacer sequence
  source 1..20: mol_type = other RNA
agttttttgagatgtaaagt

SEQ ID NO: 3235 - RNA, 20 nt, synthetic construct
  misc_feature 1..20: note = spacer sequence
  source 1..20: mol_type = other RNA
aaaaactagaagaagtggcg

SEQ ID NO: 3236 - RNA, 20 nt, synthetic construct
  misc_feature 1..20: note = spacer sequence
  source 1..20: mol_type = other RNA
caaaaaactagaagaagtgg

SEQ ID NO: 3237 - RNA, 20 nt, synthetic construct
  misc_feature 1..20: note = spacer sequence
  source 1..20: mol_type = other RNA
aacaaccaaactttacatct

SEQ ID NO: 3238 - RNA, 20 nt, synthetic construct
  misc_feature 1..20: note = spacer sequence
  source 1..20: mol_type = other RNA
caaacaaccaaactttacat

SEQ ID NO: 3239 - RNA, 20 nt, synthetic construct
  misc_feature 1..20: note = spacer sequence
  source 1..20: mol_type = other RNA
tctttttaatataggcattc

SEQ ID NO: 3240 - RNA, 20 nt, synthetic construct
  misc_feature 1..20: note = spacer sequence
  source 1..20: mol_type = other RNA
ttttaatataggcattcatt

SEQ ID NO: 3241 - RNA, 20 nt, synthetic construct
  misc_feature 1..20: note = spacer sequence
  source 1..20: mol_type = other RNA
ttgctataaacttccccgtt

SEQ ID NO: 3242 - RNA, 20 nt, synthetic construct
  misc_feature 1..20: note = spacer sequence
  source 1..20: mol_type = other RNA
gtcttggcctcccaaagtgc

SEQ ID NO: 3243 - RNA, 20 nt, synthetic construct
  misc_feature 1..20: note = spacer sequence
  source 1..20: mol_type = other RNA
tggcctcccaaagtgctggg

SEQ ID NO: 3244 - RNA, 20 nt, synthetic construct
  misc_feature 1..20: note = spacer sequence
  source 1..20: mol_type = other RNA
caaagtgctgggattacagg

SEQ ID NO: 3245 - RNA, 20 nt, synthetic construct
  misc_feature 1..20: note = spacer sequence
  source 1..20: mol_type = other RNA
cagcactttgggaggccaag

SEQ ID NO: 3246 - RNA, 20 nt, synthetic construct
  misc_feature 1..20: note = spacer sequence
  source 1..20: mol_type = other RNA
cacctgtaatcccagcactt

SEQ ID NO: 3247 - RNA, 20 nt, synthetic construct
  misc_feature 1..20: note = spacer sequence
  source 1..20: mol_type = other RNA
acataccagctgggtgcagt

SEQ ID NO: 3248 - RNA, 20 nt, synthetic construct
  misc_feature 1..20: note = spacer sequence
  source 1..20: mol_type = other RNA
atttctattcatcttaagat

SEQ ID NO: 3249 - RNA, 20 nt, synthetic construct
  misc_feature 1..20: note = spacer sequence
  source 1..20: mol_type = other RNA
attcatcttaagattttttt

SEQ ID NO: 3250 - RNA, 20 nt, synthetic construct
  misc_feature 1..20: note = spacer sequence
  source 1..20: mol_type = other RNA
tcttaagattttttttgatt

SEQ ID NO: 3251 - RNA, 20 nt, synthetic construct
  misc_feature 1..20: note = spacer sequence
  source 1..20: mol_type = other RNA
taagattttttttgatttac

SEQ ID NO: 3252 - RNA, 20 nt, synthetic construct
  misc_feature 1..20: note = spacer sequence
  source 1..20: mol_type = other RNA
taagatgaatagaaatggaa

SEQ ID NO: 3253 - RNA, 20 nt, synthetic construct
  misc_feature 1..20: note = spacer sequence
  source 1..20: mol_type = other RNA
aaaaaaaaaaaaaaaaaaaa

SEQ ID NO: 3254 - RNA, 20 nt, synthetic construct
  misc_feature 1..20: note = spacer sequence
  source 1..20: mol_type = other RNA
caaaaaaaaaaaaaaaaaaa

SEQ ID NO: 3255 - RNA, 20 nt, synthetic construct
  misc_feature 1..20: note = spacer sequence
  source 1..20: mol_type = other RNA
gtctcaaaaaaaaaaaaaaa

SEQ ID NO: 3256 - RNA, 20 nt, synthetic construct
  misc_feature 1..20: note = spacer sequence
  source 1..20: mol_type = other RNA
tgctgtcccaggctggagtg

SEQ ID NO: 3257 - RNA, 20 nt, synthetic construct
  misc_feature 1..20: note = spacer sequence
  source 1..20: mol_type = other RNA
caggctggagtgcagtggtg

SEQ ID NO: 3258 - RNA, 20 nt, synthetic construct
  misc_feature 1..20: note = spacer sequence
  source 1..20: mol_type = other RNA
agcctgggacagcaagactc

SEQ ID NO: 3259 - RNA, 20 nt, synthetic construct
  misc_feature 1..20: note = spacer sequence
  source 1..20: mol_type = other RNA
ctgaagcctcagtcctccag

SEQ ID NO: 3260 - RNA, 20 nt, synthetic construct
  misc_feature 1..20: note = spacer sequence
  source 1..20: mol_type = other RNA
gtgagccataattgcaccac

SEQ ID NO: 3261 - RNA, 20 nt, synthetic construct
  misc_feature 1..20: note = spacer sequence
  source 1..20: mol_type = other RNA
gtcctccaggctcaagcgat

SEQ ID NO: 3262 - RNA, 20 nt, synthetic construct
  misc_feature 1..20: note = spacer sequence
  source 1..20: mol_type = other RNA
tccaggctcaagcgatcctc

SEQ ID NO: 3263 - RNA, 20 nt, synthetic construct
  misc_feature 1..20: note = spacer sequence
  source 1..20: mol_type = other RNA
aggctcaagcgatcctcttg

SEQ ID NO: 3264 - RNA, 20 nt, synthetic construct
  misc_feature 1..20: note = spacer sequence
  source 1..20: mol_type = other RNA
agcgatcctcttgcctcagc

SEQ ID NO: 3265 - RNA, 20 nt, synthetic construct
  misc_feature 1..20: note = spacer sequence
  source 1..20: mol_type = other RNA
tttcttcctttttttttttt

SEQ ID NO: 3266 - RNA, 20 nt, synthetic construct
  misc_feature 1..20: note = spacer sequence
  source 1..20: mol_type = other RNA
tccttttttttttttttagt

SEQ ID NO: 3267 - RNA, 20 nt, synthetic construct
  misc_feature 1..20: note = spacer sequence
  source 1..20: mol_type = other RNA
ttttttttttttttagtaga

SEQ ID NO: 3268 - RNA, 20 nt, synthetic construct
  misc_feature 1..20: note = spacer sequence
  source 1..20: mol_type = other RNA
actaaaaaaaaaaaaaagga

SEQ ID NO: 3269 - RNA, 20 nt, synthetic construct
  misc_feature 1..20: note = spacer sequence
  source 1..20: mol_type = other RNA
ctactaaaaaaaaaaaaaag

SEQ ID NO: 3270 - RNA, 20 nt, synthetic construct
  misc_feature 1..20: note = spacer sequence
  source 1..20: mol_type = other RNA
tctctactaaaaaaaaaaaa

SEQ ID NO: 3271 - RNA, 20 nt, synthetic construct
  misc_feature 1..20: note = spacer sequence
  source 1..20: mol_type = other RNA
catctctactaaaaaaaaaa

SEQ ID NO: 3272 - RNA, 20 nt, synthetic construct
  misc_feature 1..20: note = spacer sequence
  source 1..20: mol_type = other RNA
ctttgttgcccaggctggtc

SEQ ID NO: 3273 - RNA, 20 nt, synthetic construct
  misc_feature 1..20: note = spacer sequence
  source 1..20: mol_type = other RNA
tgaactcctgagctcaagtg

SEQ ID NO: 3274 - RNA, 20 nt, synthetic construct
  misc_feature 1..20: note = spacer sequence
  source 1..20: mol_type = other RNA
agaccagcctgggcaacaaa

SEQ ID NO: 3275 - RNA, 20 nt, synthetic construct
  misc_feature 1..20: note = spacer sequence
  source 1..20: mol_type = other RNA
tgagctcaagtgatcctcct

SEQ ID NO: 3276 - RNA, 20 nt, synthetic construct
  misc_feature 1..20: note = spacer sequence
  source 1..20: mol_type = other RNA
ggagttcaagaccagcctgg

SEQ ID NO: 3277 - RNA, 20 nt, synthetic construct
  misc_feature 1..20: note = spacer sequence
  source 1..20: mol_type = other RNA
agtgatcctcctgctttggc

SEQ ID NO: 3278 - RNA, 20 nt, synthetic construct
  misc_feature 1..20: note = spacer sequence
  source 1..20: mol_type = other RNA
cttgagctcaggagttcaag

SEQ ID NO: 3279 - RNA, 20 nt, synthetic construct
  misc_feature 1..20: note = spacer sequence
  source 1..20: mol_type = other RNA
tcctgctttggcctcccaaa

SEQ ID NO: 3280 - RNA, 20 nt, synthetic construct
  misc_feature 1..20: note = spacer sequence
  source 1..20: mol_type = other RNA
tgctttggcctcccaaagtg

SEQ ID NO: 3281 - RNA, 20 nt, synthetic construct
  misc_feature 1..20: note = spacer sequence
  source 1..20: mol_type = other RNA
caaagtgctgggattacagg

SEQ ID NO: 3282 - RNA, 20 nt, synthetic construct
  misc_feature 1..20: note = spacer sequence
  source 1..20: mol_type = other RNA
gagctgtttttttctgctat

SEQ ID NO: 3283 - RNA, 20 nt, synthetic construct
  misc_feature 1..20: note = spacer sequence
  source 1..20: mol_type = other RNA
gaggccaggcatggtggctc

SEQ ID NO: 3284 - RNA, 20 nt, synthetic construct
  misc_feature 1..20: note = spacer sequence
  source 1..20: mol_type = other RNA
gctattggcttctagtttta

SEQ ID NO: 3285 - RNA, 20 nt, synthetic construct
  misc_feature 1..20: note = spacer sequence
  source 1..20: mol_type = other RNA
agttttatttcactgtggtc

SEQ ID NO: 3286 - RNA, 20 nt, synthetic construct
  misc_feature 1..20: note = spacer sequence
  source 1..20: mol_type = other RNA
ctgtggtcagaaaagatact

SEQ ID NO: 3287 - RNA, 20 nt, synthetic construct
  misc_feature 1..20: note = spacer sequence
  source 1..20: mol_type = other RNA
gaaaagatacttggtatgac

SEQ ID NO: 3288 - RNA, 20 nt, synthetic construct
  misc_feature 1..20: note = spacer sequence
  source 1..20: mol_type = other RNA
gaccacagtgaaataaaact

SEQ ID NO: 3289 - RNA, 20 nt, synthetic construct
  misc_feature 1..20: note = spacer sequence
  source 1..20: mol_type = other RNA
tttctgaccacagtgaaata

SEQ ID NO: 3290 - RNA, 20 nt, synthetic construct
  misc_feature 1..20: note = spacer sequence
  source 1..20: mol_type = other RNA
taccaagtatcttttctgac

SEQ ID NO: 3291 - RNA, 20 nt, synthetic construct
  misc_feature 1..20: note = spacer sequence
  source 1..20: mol_type = other RNA
gtcttcttaaacttgttagg

SEQ ID NO: 3292 - RNA, 20 nt, synthetic construct
  misc_feature 1..20: note = spacer sequence
  source 1..20: mol_type = other RNA
tcttaaacttgttaggactt

SEQ ID NO: 3293 - RNA, 20 nt, synthetic construct
  misc_feature 1..20: note = spacer sequence
  source 1..20: mol_type = other RNA
taaacttgttaggacttgtt

SEQ ID NO: 3294 - RNA, 20 nt, synthetic construct
  misc_feature 1..20: note = spacer sequence
  source 1..20: mol_type = other RNA
taacaagtttaagaagactg

SEQ ID NO: 3295 - RNA, 20 nt, synthetic construct
  misc_feature 1..20: note = spacer sequence
  source 1..20: mol_type = other RNA
ggagaatattccacatgcac

SEQ ID NO: 3296 - RNA, 20 nt, synthetic construct
  misc_feature 1..20: note = spacer sequence
  source 1..20: mol_type = other RNA
agagtaaattgtagtgttag

SEQ ID NO: 3297 - RNA, 20 nt, synthetic construct
  misc_feature 1..20: note = spacer sequence
  source 1..20: mol_type = other RNA
ccagagtaaattgtagtgtt

SEQ ID NO: 3298 - RNA, 20 nt, synthetic construct
  misc_feature 1..20: note = spacer sequence
  source 1..20: mol_type = other RNA
acatgcacttgaaaaggatg

SEQ ID NO: 3299 - RNA, 20 nt, synthetic construct
  misc_feature 1..20: note = spacer sequence
  source 1..20: mol_type = other RNA
agtgcatgtggaatattctc

SEQ ID NO: 3300 - RNA, 20 nt, synthetic construct
  misc_feature 1..20: note = spacer sequence
  source 1..20: mol_type = other RNA
ttttcaagtgcatgtggaat

SEQ ID NO: 3301 - RNA, 20 nt, synthetic construct
  misc_feature 1..20: note = spacer sequence
  source 1..20: mol_type = other RNA
acatccttttcaagtgcatg

SEQ ID NO: 3302 - RNA, 20 nt, synthetic construct
  misc_feature 1..20: note = spacer sequence
  source 1..20: mol_type = other RNA
gctgctgttgggtggaatgt

SEQ ID NO: 3303 - RNA, 20 nt, synthetic construct
  misc_feature 1..20: note = spacer sequence
  source 1..20: mol_type = other RNA
acccaacagcagcagaatcc

SEQ ID NO: 3304 - RNA, 20 nt, synthetic construct
  misc_feature 1..20: note = spacer sequence
  source 1..20: mol_type = other RNA
ctgtatgtctgtcaggtcca

SEQ ID NO: 3305 - RNA, 20 nt, synthetic construct
  misc_feature 1..20: note = spacer sequence
  source 1..20: mol_type = other RNA
gtatgtctgtcaggtccatt

SEQ ID NO: 3306 - RNA, 20 nt, synthetic construct
  misc_feature 1..20: note = spacer sequence
  source 1..20: mol_type = other RNA
gtcaggtccatttagtgtac

SEQ ID NO: 3307 - RNA, 20 nt, synthetic construct
  misc_feature 1..20: note = spacer sequence
  source 1..20: mol_type = other RNA
ggtccatttagtgtacagtg

SEQ ID NO: 3308 - RNA, 20 nt, synthetic construct
  misc_feature 1..20: note = spacer sequence
  source 1..20: mol_type = other RNA
atttagtgtacagtgttcaa

SEQ ID NO: 3309 - RNA, 20 nt, synthetic construct
  misc_feature 1..20: note = spacer sequence
  source 1..20: mol_type = other RNA
aatcatttgtttccttatca

SEQ ID NO: 3310 - RNA, 20 nt, synthetic construct
  misc_feature 1..20: note = spacer sequence
  source 1..20: mol_type = other RNA
tttgtttccttatcaatagt

SEQ ID NO: 3311 - RNA, 20 nt, synthetic construct
  misc_feature 1..20: note = spacer sequence
  source 1..20: mol_type = other RNA
ttatcaatagtctatctgga

SEQ ID NO: 3312 - RNA, 20 nt, synthetic construct
  misc_feature 1..20: note = spacer sequence
  source 1..20: mol_type = other RNA
atagtctatctggatgttct

SEQ ID NO: 3313 - RNA, 20 nt, synthetic construct
  misc_feature 1..20: note = spacer sequence
  source 1..20: mol_type = other RNA
atctggatgttctatccact

SEQ ID NO: 3314 - RNA, 20 nt, synthetic construct
  misc_feature 1..20: note = spacer sequence
  source 1..20: mol_type = other RNA
ggatgttctatccactattg

SEQ ID NO: 3315 - RNA, 20 nt, synthetic construct
  misc_feature 1..20: note = spacer sequence
  source 1..20: mol_type = other RNA
agatagactattgataagga

SEQ ID NO: 3316 - RNA, 20 nt, synthetic construct
  misc_feature 1..20: note = spacer sequence
  source 1..20: mol_type = other RNA
atccactattgaaagtgggg

SEQ ID NO: 3317 - RNA, 20 nt, synthetic construct
  misc_feature 1..20: note = spacer sequence
  source 1..20: mol_type = other RNA
actattgaaagtggggtatt

SEQ ID NO: 3318 - RNA, 20 nt, synthetic construct
  misc_feature 1..20: note = spacer sequence
  source 1..20: mol_type = other RNA
atagtggatagaacatccag

SEQ ID NO: 3319 - RNA, 20 nt, synthetic construct
  misc_feature 1..20: note = spacer sequence
  source 1..20: mol_type = other RNA
ataccccactttcaatagtg

SEQ ID NO: 3320 - RNA, 20 nt, synthetic construct
  misc_feature 1..20: note = spacer sequence
  source 1..20: mol_type = other RNA
gttactgtaattgtattgct

SEQ ID NO: 3321 - RNA, 20 nt, synthetic construct
  misc_feature 1..20: note = spacer sequence
  source 1..20: mol_type = other RNA
gcatttgctttacatattta

SEQ ID NO: 3322 - RNA, 20 nt, synthetic construct
  misc_feature 1..20: note = spacer sequence
  source 1..20: mol_type = other RNA
gatgttgagtgaatatttat

SEQ ID NO: 3323 - RNA, 20 nt, synthetic construct
  misc_feature 1..20: note = spacer sequence
  source 1..20: mol_type = other RNA
gaacacctaaatatgtaaag

SEQ ID NO: 3324 - RNA, 20 nt, synthetic construct
  misc_feature 1..20: note = spacer sequence
  source 1..20: mol_type = other RNA
acatcagaacacctaaatat

SEQ ID NO: 3325 - RNA, 20 nt, synthetic construct
  misc_feature 1..20: note = spacer sequence
  source 1..20: mol_type = other RNA
ctcaacatcagaacacctaa

SEQ ID NO: 3326 - RNA, 20 nt, synthetic construct
  misc_feature 1..20: note = spacer sequence
  source 1..20: mol_type = other RNA
tcctagtgaattggccgttt

SEQ ID NO: 3327 - RNA, 20 nt, synthetic construct
  misc_feature 1..20: note = spacer sequence
  source 1..20: mol_type = other RNA
tagtgaattggccgttttat

SEQ ID NO: 3328 - RNA, 20 nt, synthetic construct
  misc_feature 1..20: note = spacer sequence
  source 1..20: mol_type = other RNA
ctaggaagacataacaatta

SEQ ID NO: 3329 - RNA, 20 nt, synthetic construct
  misc_feature 1..20: note = spacer sequence
  source 1..20: mol_type = other RNA
ttatataatgtccttccttg

SEQ ID NO: 3330 - RNA, 20 nt, synthetic construct
  misc_feature 1..20: note = spacer sequence
  source 1..20: mol_type = other RNA
ttccttgtctcttatgacag

SEQ ID NO: 3331 - RNA, 20 nt, synthetic construct
  misc_feature 1..20: note = spacer sequence
  source 1..20: mol_type = other RNA
ttgtctcttatgacagtttt

SEQ ID NO: 3332 - RNA, 20 nt, synthetic construct
  misc_feature 1..20: note = spacer sequence
  source 1..20: mol_type = other RNA
cttatgacagttttaaattt

SEQ ID NO: 3333 - RNA, 20 nt, synthetic construct
  misc_feature 1..20: note = spacer sequence
  source 1..20: mol_type = other RNA
tatgacagttttaaatttta

SEQ ID NO: 3334 - RNA, 20 nt, synthetic construct
  misc_feature 1..20: note = spacer sequence
  source 1..20: mol_type = other RNA
taagagacaaggaaggacat

SEQ ID NO: 3335 - RNA, 20 nt, synthetic construct
  misc_feature 1..20: note = spacer sequence
  source 1..20: mol_type = other RNA
attttgtctgatccaagtat

SEQ ID NO: 3336 - RNA, 20 nt, synthetic construct
  misc_feature 1..20: note = spacer sequence
  source 1..20: mol_type = other RNA
gatccaagtataaccacttc

SEQ ID NO: 3337 - RNA, 20 nt, synthetic construct
  misc_feature 1..20: note = spacer sequence
  source 1..20: mol_type = other RNA
gacaaaatagagttaaaatt

SEQ ID NO: 3338 - RNA, 20 nt, synthetic construct
  misc_feature 1..20: note = spacer sequence
  source 1..20: mol_type = other RNA
aagtataaccacttctgcac

SEQ ID NO: 3339 - RNA, 20 nt, synthetic construct
  misc_feature 1..20: note = spacer sequence
  source 1..20: mol_type = other RNA
gcactcgtttaccagttgca

SEQ ID NO: 3340 - RNA, 20 nt, synthetic construct
  misc_feature 1..20: note = spacer sequence
  source 1..20: mol_type = other RNA
tgtttttttatccactcagc

SEQ ID NO: 3341 - RNA, 20 nt, synthetic construct
  misc_feature 1..20: note = spacer sequence
  source 1..20: mol_type = other RNA
actcagccattctatatctt

SEQ ID NO: 3342 - RNA, 20 nt, synthetic construct
  misc_feature 1..20: note = spacer sequence
  source 1..20: mol_type = other RNA
gccattctatatcttttgat

SEQ ID NO: 3343 - RNA, 20 nt, synthetic construct
  misc_feature 1..20: note = spacer sequence
  source 1..20: mol_type = other RNA
atatcttttgattagggggt

SEQ ID NO: 3344 - RNA, 20 nt, synthetic construct
  misc_feature 1..20: note = spacer sequence
  source 1..20: mol_type = other RNA
tttgattagggggtttaatc

SEQ ID NO: 3345 - RNA, 20 nt, synthetic construct
  misc_feature 1..20: note = spacer sequence
  source 1..20: mol_type = other RNA
aaagatatagaatggctgag

SEQ ID NO: 3346 - RNA, 20 nt, synthetic construct
  misc_feature 1..20: note = spacer sequence
  source 1..20: mol_type = other RNA
atttacatttaaagtaatta

SEQ ID NO: 3347 - RNA, 20 nt, synthetic construct
  misc_feature 1..20: note = spacer sequence
  source 1..20: mol_type = other RNA
ctataaataattactttaaa

SEQ ID NO: 3348 - RNA, 20 nt, synthetic construct
  misc_feature 1..20: note = spacer sequence
  source 1..20: mol_type = other RNA
tccctataaataattacttt

SEQ ID NO: 3349 - RNA, 20 nt, synthetic construct
  misc_feature 1..20: note = spacer sequence
  source 1..20: mol_type = other RNA
tgacctcaggtgatctgcct

SEQ ID NO: 3350 - RNA, 20 nt, synthetic construct
  misc_feature 1..20: note = spacer sequence
  source 1..20: mol_type = other RNA
ggagtttgataccagccagg

SEQ ID NO: 3351 - RNA, 20 nt, synthetic construct
  misc_feature 1..20: note = spacer sequence
  source 1..20: mol_type = other RNA
ggtgatctgcctaccttcgc

SEQ ID NO: 3352 - RNA, 20 nt, synthetic construct
  misc_feature 1..20: note = spacer sequence
  source 1..20: mol_type = other RNA
cctgaggtcaggagtttgat

SEQ ID NO: 3353 - RNA, 20 nt, synthetic construct
  misc_feature 1..20: note = spacer sequence
  source 1..20: mol_type = other RNA
gcctaccttcgcctcccaaa

SEQ ID NO: 3354 - RNA, 20 nt, synthetic construct
  misc_feature 1..20: note = spacer sequence
  source 1..20: mol_type = other RNA
cctcccaaagtgttgggatt

SEQ ID NO: 3355 - RNA, 20 nt, synthetic construct
  misc_feature 1..20: note = spacer sequence
  source 1..20: mol_type = other RNA
caaagtgttgggattacagg

SEQ ID NO: 3356 - RNA, 20 nt, synthetic construct
  misc_feature 1..20: note = spacer sequence
  source 1..20: mol_type = other RNA
caacactttgggaggcgaag

SEQ ID NO: 3357 - RNA, 20 nt, synthetic construct
  misc_feature 1..20: note = spacer sequence
  source 1..20: mol_type = other RNA
tgcctgtaatcccaacactt

SEQ ID NO: 3358 - RNA, 20 nt, synthetic construct
  misc_feature 1..20: note = spacer sequence
  source 1..20: mol_type = other RNA
tataattcttttgtccatct

SEQ ID NO: 3359 - RNA, 20 nt, synthetic construct
  misc_feature 1..20: note = spacer sequence
  source 1..20: mol_type = other RNA
tttgtccatctgttcctctc

SEQ ID NO: 3360 - RNA, 20 nt, synthetic construct
  misc_feature 1..20: note = spacer sequence
  source 1..20: mol_type = other RNA
atctgttcctctcttgctgt

SEQ ID NO: 3361 - RNA, 20 nt, synthetic construct
  misc_feature 1..20: note = spacer sequence
  source 1..20: mol_type = other RNA
gttcctctcttgctgtcttc

SEQ ID NO: 3362 - RNA, 20 nt, synthetic construct
  misc_feature 1..20: note = spacer sequence
  source 1..20: mol_type = other RNA
tctcttgctgtcttcctttt

SEQ ID NO: 3363 - RNA, 20 nt, synthetic construct
  misc_feature 1..20: note = spacer sequence
  source 1..20: mol_type = other RNA
cttgctgtcttcctttttgt

SEQ ID NO: 3364 - RNA, 20 nt, synthetic construct
  misc_feature 1..20: note = spacer sequence
  source 1..20: mol_type = other RNA
tgctgtcttcctttttgttt

SEQ ID NO: 3365 - RNA, 20 nt, synthetic construct
  misc_feature 1..20: note = spacer sequence
  source 1..20: mol_type = other RNA
tcctttttgttttgtttttt

SEQ ID NO: 3366 - RNA, 20 nt, synthetic construct
  misc_feature 1..20: note = spacer sequence
  source 1..20: mol_type = other RNA
tttttgttttgttttttttt

SEQ ID NO: 3367 - RNA, 20 nt, synthetic construct
  misc_feature 1..20: note = spacer sequence
  source 1..20: mol_type = other RNA
atacaaaaaaaaaaaaaaca

SEQ ID NO: 3368 - RNA, 20 nt, synthetic construct
  misc_feature 1..20: note = spacer sequence
  source 1..20: mol_type = other RNA
ttcctctttttcttttgtgt

SEQ ID NO: 3369 - RNA, 20 nt, synthetic construct
  misc_feature 1..20: note = spacer sequence
  source 1..20: mol_type = other RNA
tctttttcttttgtgtaatt

SEQ ID NO: 3370 - RNA, 20 nt, synthetic construct
  misc_feature 1..20: note = spacer sequence
  source 1..20: mol_type = other RNA
ttttcttttgtgtaattttt

SEQ ID NO: 3371 - RNA, 20 nt, synthetic construct
  misc_feature 1..20: note = spacer sequence
  source 1..20: mol_type = other RNA
tttgtgtaatttttacagat

SEQ ID NO: 3372 - RNA, 20 nt, synthetic construct
  misc_feature 1..20: note = spacer sequence
  source 1..20: mol_type = other RNA
gtaaaaattacacaaaagaa

SEQ ID NO: 3373 - RNA, 20 nt, synthetic construct
  misc_feature 1..20: note = spacer sequence
  source 1..20: mol_type = other RNA
ttgtcatcatcatggggttt

SEQ ID NO: 3374 - RNA, 20 nt, synthetic construct
  misc_feature 1..20: note = spacer sequence
  source 1..20: mol_type = other RNA
tcatcatggggtttacaaaa

SEQ ID NO: 3375 - RNA, 20 nt, synthetic construct
  misc_feature 1..20: note = spacer sequence
  source 1..20: mol_type = other RNA
tcatggggtttacaaaaaca

SEQ ID NO: 3376 - RNA, 20 nt, synthetic construct
  misc_feature 1..20: note = spacer sequence
  source 1..20: mol_type = other RNA
tggggtttacaaaaacaatc

SEQ ID NO: 3377 - RNA, 20 nt, synthetic construct
  misc_feature 1..20: note = spacer sequence
  source 1..20: mol_type = other RNA
tatggttagaacagtctatt

SEQ ID NO: 3378 - RNA, 20 nt, synthetic construct
  misc_feature 1..20: note = spacer sequence
  source 1..20: mol_type = other RNA
aaccataagattgtttttgt

SEQ ID NO: 3379 - RNA, 20 nt, synthetic construct
  misc_feature 1..20: note = spacer sequence
  source 1..20: mol_type = other RNA
attttaagctgataacaact

SEQ ID NO: 3380 - RNA, 20 nt, synthetic construct
  misc_feature 1..20: note = spacer sequence
  source 1..20: mol_type = other RNA
gcttaaaatagactgttcta

SEQ ID NO: 3381 - RNA, 20 nt, synthetic construct
  misc_feature 1..20: note = spacer sequence
  source 1..20: mol_type = other RNA
attgtatacaaaacataata

SEQ ID NO: 3382 - RNA, 20 nt, synthetic construct
  misc_feature 1..20: note = spacer sequence
  source 1..20: mol_type = other RNA
taatttacatgtacttatct

SEQ ID NO: 3383 - RNA, 20 nt, synthetic construct
  misc_feature 1..20: note = spacer sequence
  source 1..20: mol_type = other RNA
tatgtatctattaatgtatc

SEQ ID NO: 3384 - RNA, 20 nt, synthetic construct
  misc_feature 1..20: note = spacer sequence
  source 1..20: mol_type = other RNA
attaatgtatcctttaacta

SEQ ID NO: 3385 - RNA, 20 nt, synthetic construct
  misc_feature 1..20: note = spacer sequence
  source 1..20: mol_type = other RNA
tttaactataggtatttata

SEQ ID NO: 3386 - RNA, 20 nt, synthetic construct
  misc_feature 1..20: note = spacer sequence
  source 1..20: mol_type = other RNA
tttaacttttatactagaat

SEQ ID NO: 3387 - RNA, 20 nt, synthetic construct
  misc_feature 1..20: note = spacer sequence
  source 1..20: mol_type = other RNA
agtataaaagttaaaagaca

SEQ ID NO: 3388 - RNA, 20 nt, synthetic construct
  misc_feature 1..20: note = spacer sequence
  source 1..20: mol_type = other RNA
aaagtgatttacccacaacc

SEQ ID NO: 3389 - RNA, 20 nt, synthetic construct
  misc_feature 1..20: note = spacer sequence
  source 1..20: mol_type = other RNA
cttttgattctagtataaaa

SEQ ID NO: 3390 - RNA, 20 nt, synthetic construct
  misc_feature 1..20: note = spacer sequence
  source 1..20: mol_type = other RNA
gtatttgtctttgtatttac

SEQ ID NO: 3391 - RNA, 20 nt, synthetic construct
  misc_feature 1..20: note = spacer sequence
  source 1..20: mol_type = other RNA
ttgtatttacctttaccagt

SEQ ID NO: 3392 - RNA, 20 nt, synthetic construct
  misc_feature 1..20: note = spacer sequence
  source 1..20: mol_type = other RNA
tatgcaactgttttgctgtt

SEQ ID NO: 3393 - RNA, 20 nt, synthetic construct
  misc_feature 1..20: note = spacer sequence
  source 1..20: mol_type = other RNA
ttttgtttcaacttgaagaa

SEQ ID NO: 3394 - RNA, 20 nt, synthetic construct
  misc_feature 1..20: note = spacer sequence
  source 1..20: mol_type = other RNA
acttgaagaactccctttag

SEQ ID NO: 3395 - RNA, 20 nt, synthetic construct
  misc_feature 1..20: note = spacer sequence
  source 1..20: mol_type = other RNA
agttgaaacaaaaggatgct

SEQ ID NO: 3396 - RNA, 20 nt, synthetic construct
  misc_feature 1..20: note = spacer sequence
  source 1..20: mol_type = other RNA
tcaagttgaaacaaaaggat

SEQ ID NO: 3397 - RNA, 20 nt, synthetic construct
  misc_feature 1..20: note = spacer sequence
  source 1..20: mol_type = other RNA
ctttagcatttttttgtacg

SEQ ID NO: 3398 - RNA, 20 nt, synthetic construct
  misc_feature 1..20: note = spacer sequence
  source 1..20: mol_type = other RNA
tttagcttttgtttttcgtg

SEQ ID NO: 3399 - RNA, 20 nt, synthetic construct
  misc_feature 1..20: note = spacer sequence
  source 1..20: mol_type = other RNA
tgggaaaacttcatttctcc

SEQ ID NO: 3400 - RNA, 20 nt, synthetic construct
  misc_feature 1..20: note = spacer sequence
  source 1..20: mol_type = other RNA
cacgaaaaacaaaagctaaa

SEQ ID NO: 3401 - RNA, 20 nt, synthetic construct
  misc_feature 1..20: note = spacer sequence
  source 1..20: mol_type = other RNA
tttctccttcattttggaag

SEQ ID NO: 3402 - RNA, 20 nt, synthetic construct
  misc_feature 1..20: note = spacer sequence
  source 1..20: mol_type = other RNA
ccttcattttggaaggagta

SEQ ID NO: 3403 - RNA, 20 nt, synthetic construct
  misc_feature 1..20: note = spacer sequence
  source 1..20: mol_type = other RNA
ttcattttggaaggagtatt

SEQ ID NO: 3404 - RNA, 20 nt, synthetic construct
  misc_feature 1..20: note = spacer sequence
  source 1..20: mol_type = other RNA
ttttggaaggagtattttgc

SEQ ID NO: 3405 - RNA, 20 nt, synthetic construct
  misc_feature 1..20: note = spacer sequence
  source 1..20: mol_type = other RNA
aaaatgaaggagaaatgaag

SEQ ID NO: 3406 - RNA, 20 nt, synthetic construct
  misc_feature 1..20: note = spacer sequence
  source 1..20: mol_type = other RNA
ttccaaaatgaaggagaaat

SEQ ID NO: 3407 - RNA, 20 nt, synthetic construct
  misc_feature 1..20: note = spacer sequence
  source 1..20: mol_type = other RNA
tagttgacaagttttttttt

SEQ ID NO: 3408 - RNA, 20 nt, synthetic construct
  misc_feature 1..20: note = spacer sequence
  source 1..20: mol_type = other RNA
actaagaatactatgcctgg

SEQ ID NO: 3409 - RNA, 20 nt, synthetic construct
  misc_feature 1..20: note = spacer sequence
  source 1..20: mol_type = other RNA
tttcagtactttgattatat

SEQ ID NO: 3410 - RNA, 20 nt, synthetic construct
  misc_feature 1..20: note = spacer sequence
  source 1..20: mol_type = other RNA
gtactttgattatattaccc

SEQ ID NO: 3411 - RNA, 20 nt, synthetic construct
  misc_feature 1..20: note = spacer sequence
  source 1..20: mol_type = other RNA
aagtactgaaaggaaaaaaa

SEQ ID NO: 3412 - RNA, 20 nt, synthetic construct
  misc_feature 1..20: note = spacer sequence
  source 1..20: mol_type = other RNA
cttctggcctacaaagtttc

SEQ ID NO: 3413 - RNA, 20 nt, synthetic construct
  misc_feature 1..20: note = spacer sequence
  source 1..20: mol_type = other RNA
ggcctacaaagtttccactg

SEQ ID NO: 3414 - RNA, 20 nt, synthetic construct
  misc_feature 1..20: note = spacer sequence
  source 1..20: mol_type = other RNA
actgagaaatcaacttatag

SEQ ID NO: 3415 - RNA, 20 nt, synthetic construct
  misc_feature 1..20: note = spacer sequence
  source 1..20: mol_type = other RNA
gtggaaactttgtaggccag

SEQ ID NO: 3416 - RNA, 20 nt, synthetic construct
  misc_feature 1..20: note = spacer sequence
  source 1..20: mol_type = other RNA
cagtggaaactttgtaggcc

SEQ ID NO: 3417 - RNA, 20 nt, synthetic construct
  misc_feature 1..20: note = spacer sequence
  source 1..20: mol_type = other RNA
acttatagtcttataggggc

SEQ ID NO: 3418 - RNA, 20 nt, synthetic construct
  misc_feature 1..20: note = spacer sequence
  source 1..20: mol_type = other RNA
tataggggctcccttgtaca

SEQ ID NO: 3419 - RNA, 20 nt, synthetic construct
  misc_feature 1..20: note = spacer sequence
  source 1..20: mol_type = other RNA
cttgtacatgtccttataca

SEQ ID NO: 3420 - RNA, 20 nt, synthetic construct
  misc_feature 1..20: note = spacer sequence
  source 1..20: mol_type = other RNA
caccactgcattgaagtctt

SEQ ID NO: 3421 - RNA, 20 nt, synthetic construct
  misc_feature 1..20: note = spacer sequence
  source 1..20: mol_type = other RNA
atgaagcctcgaatgcctgg

SEQ ID NO: 3422 - RNA, 20 nt, synthetic construct
  misc_feature 1..20: note = spacer sequence
  source 1..20: mol_type = other RNA
ttgaactattatcacaccac

SEQ ID NO: 3423 - RNA, 20 nt, synthetic construct
  misc_feature 1..20: note = spacer sequence
  source 1..20: mol_type = other RNA
aatgcctgggcaaaagggat

SEQ ID NO: 3424 - RNA, 20 nt, synthetic construct
  misc_feature 1..20: note = spacer sequence
  source 1..20: mol_type = other RNA
aggcttcattgaactattat

SEQ ID NO: 3425 - RNA, 20 nt, synthetic construct
  misc_feature 1..20: note = spacer sequence
  source 1..20: mol_type = other RNA
cttttgcccaggcattcgag

SEQ ID NO: 3426 - RNA, 20 nt, synthetic construct
  misc_feature 1..20: note = spacer sequence
  source 1..20: mol_type = other RNA
tcccatctcagcctccagat

SEQ ID NO: 3427 - RNA, 20 nt, synthetic construct
  misc_feature 1..20: note = spacer sequence
  source 1..20: mol_type = other RNA
catctcagcctccagattag

SEQ ID NO: 3428 - RNA, 20 nt, synthetic construct
  misc_feature 1..20: note = spacer sequence
  source 1..20: mol_type = other RNA
cagcctccagattagctggg

SEQ ID NO: 3429 - RNA, 20 nt, synthetic construct
  misc_feature 1..20: note = spacer sequence
  source 1..20: mol_type = other RNA
gcctccagattagctgggac

SEQ ID NO: 3430 - RNA, 20 nt, synthetic construct
  misc_feature 1..20: note = spacer sequence
  source 1..20: mol_type = other RNA
agattagctgggactacagg

SEQ ID NO: 3431 - RNA, 20 nt, synthetic construct
  misc_feature 1..20: note = spacer sequence
  source 1..20: mol_type = other RNA
ggaggctgagatgggaggat

SEQ ID NO: 3432 - RNA, 20 nt, synthetic construct
  misc_feature 1..20: note = spacer sequence
  source 1..20: mol_type = other RNA
cagctaatctggaggctgag

SEQ ID NO: 3433 - RNA, 20 nt, synthetic construct
  misc_feature 1..20: note = spacer sequence
  source 1..20: mol_type = other RNA
cgctaattattttatttttc

SEQ ID NO: 3434 - RNA, 20 nt, synthetic construct
  misc_feature 1..20: note = spacer sequence
  source 1..20: mol_type = other RNA
tgcctgtaattccagcactt

SEQ ID NO: 3435 - RNA, 20 nt, synthetic construct
  misc_feature 1..20: note = spacer sequence
  source 1..20: mol_type = other RNA
ccacaccaggcacttcttga

SEQ ID NO: 3436 - RNA, 20 nt, synthetic construct
  misc_feature 1..20: note = spacer sequence
  source 1..20: mol_type = other RNA
tgaccatttttaagtgtata

SEQ ID NO: 3437 - RNA, 20 nt, synthetic construct
  misc_feature 1..20: note = spacer sequence
  source 1..20: mol_type = other RNA
agaagtgcctggtgtggtga

SEQ ID NO: 3438 - RNA, 20 nt, synthetic construct
  misc_feature 1..20: note = spacer sequence
  source 1..20: mol_type = other RNA
gtagcattaagtatttcata

SEQ ID NO: 3439 - RNA, 20 nt, synthetic construct
  misc_feature 1..20: note = spacer sequence
  source 1..20: mol_type = other RNA
tattgttgttgaaccagtct

SEQ ID NO: 3440 - RNA, 20 nt, synthetic construct
  misc_feature 1..20: note = spacer sequence
  source 1..20: mol_type = other RNA
acaacaatatgaaatactta

SEQ ID NO: 3441 - RNA, 20 nt, synthetic construct
  misc_feature 1..20: note = spacer sequence
  source 1..20: mol_type = other RNA
ccagacttcttttcatcctg

SEQ ID NO: 3442 - RNA, 20 nt, synthetic construct
  misc_feature 1..20: note = spacer sequence
  source 1..20: mol_type = other RNA
agacttcttttcatcctgta

SEQ ID NO: 3443 - RNA, 20 nt, synthetic construct
  misc_feature 1..20: note = spacer sequence
  source 1..20: mol_type = other RNA
ggagactggttcaacaacaa

SEQ ID NO: 3444 - RNA, 20 nt, synthetic construct
  misc_feature 1..20: note = spacer sequence
  source 1..20: mol_type = other RNA
tttcatcctgtaaatctaaa

SEQ ID NO: 3445 - RNA, 20 nt, synthetic construct
  misc_feature 1..20: note = spacer sequence
  source 1..20: mol_type = other RNA
tagccccctgcagccttgac

SEQ ID NO: 3446 - RNA, 20 nt, synthetic construct
  misc_feature 1..20: note = spacer sequence
  source 1..20: mol_type = other RNA
aggctgcagggggctatgac

SEQ ID NO: 3447 - RNA, 20 nt, synthetic construct
  misc_feature 1..20: note = spacer sequence
  source 1..20: mol_type = other RNA
tgggctcaagcaattctctt

SEQ ID NO: 3448 - RNA, 20 nt, synthetic construct
  misc_feature 1..20: note = spacer sequence
  source 1..20: mol_type = other RNA
agcaattctcttgcctcagc

SEQ ID NO: 3449 - RNA, 20 nt, synthetic construct
  misc_feature 1..20: note = spacer sequence
  source 1..20: mol_type = other RNA
cttgcctcagcctcccaagt

SEQ ID NO: 3450 - RNA, 20 nt, synthetic construct
  misc_feature 1..20: note = spacer sequence
  source 1..20: mol_type = other RNA
tgcctcagcctcccaagtag

SEQ ID NO: 3451 - RNA, 20 nt, synthetic construct
  misc_feature 1..20: note = spacer sequence
  source 1..20: mol_type = other RNA
gcctcccaagtagctggaac

SEQ ID NO: 3452 - RNA, 20 nt, synthetic construct
  misc_feature 1..20: note = spacer sequence
  source 1..20: mol_type = other RNA
caagtagctggaactacagg

SEQ ID NO: 3453 - RNA, 20 nt, synthetic construct
  misc_feature 1..20: note = spacer sequence
  source 1..20: mol_type = other RNA
agctacttgggaggctgagg

SEQ ID NO: 3454 - RNA, 20 nt, synthetic construct
  misc_feature 1..20: note = spacer sequence
  source 1..20: mol_type = other RNA
actaaaaatacaaaaattag

SEQ ID NO: 3455 - RNA, 20 nt, synthetic construct
  misc_feature 1..20: note = spacer sequence
  source 1..20: mol_type = other RNA
ctactaaaaatacaaaaatt

SEQ ID NO: 3456 - RNA, 20 nt, synthetic construct
  misc_feature 1..20: note = spacer sequence
  source 1..20: mol_type = other RNA
ccatgttggccaagtaggtc

SEQ ID NO: 3457 - RNA, 20 nt, synthetic construct
  misc_feature 1..20: note = spacer sequence
  source 1..20: mol_type = other RNA
agaactcctgacctcaagtg

SEQ ID NO: 3458 - RNA, 20 nt, synthetic construct
  misc_feature 1..20: note = spacer sequence
  source 1..20: mol_type = other RNA
agacctacttggccaacatg

SEQ ID NO: 3459 - RNA, 20 nt, synthetic construct
  misc_feature 1..20: note = spacer sequence
  source 1..20: mol_type = other RNA
tgacctcaagtgatccacct

SEQ ID NO: 3460 - RNA, 20 nt, synthetic construct
  misc_feature 1..20: note = spacer sequence
  source 1..20: mol_type = other RNA
ggagttctagacctacttgg

SEQ ID NO: 3461 - RNA, 20 nt, synthetic construct
  misc_feature 1..20: note = spacer sequence
  source 1..20: mol_type = other RNA
agtgatccacctgcctcggc

SEQ ID NO: 3462 - RNA, 20 nt, synthetic construct
  misc_feature 1..20: note = spacer sequence
  source 1..20: mol_type = other RNA
cttgaggtcaggagttctag

SEQ ID NO: 3463 - RNA, 20 nt, synthetic construct
  misc_feature 1..20: note = spacer sequence
  source 1..20: mol_type = other RNA
acctgcctcggcctcccaaa

SEQ ID NO: 3464 - RNA, 20 nt, synthetic construct
  misc_feature 1..20: note = spacer sequence
  source 1..20: mol_type = other RNA
gcctcccaaagtgctggact

SEQ ID NO: 3465 - RNA, 20 nt, synthetic construct
  misc_feature 1..20: note = spacer sequence
  source 1..20: mol_type = other RNA
caaagtgctggactattttg

SEQ ID NO: 3466 - RNA, 20 nt, synthetic construct
  misc_feature 1..20: note = spacer sequence
  source 1..20: mol_type = other RNA
agcactttgggaggccgagg

SEQ ID NO: 3467 - RNA, 20 nt, synthetic construct
  misc_feature 1..20: note = spacer sequence
  source 1..20: mol_type = other RNA
aaaatagtccagcactttgg

SEQ ID NO: 3468 - RNA, 20 nt, synthetic construct
  misc_feature 1..20: note = spacer sequence
  source 1..20: mol_type = other RNA
caccttccaaaatagtccag

SEQ ID NO: 3469 - RNA, 20 nt, synthetic construct
  misc_feature 1..20: note = spacer sequence
  source 1..20: mol_type = other RNA
tagccaggcacggtggctca

SEQ ID NO: 3470 - RNA, 20 nt, synthetic construct
  misc_feature 1..20: note = spacer sequence
  source 1..20: mol_type = other RNA
atttcctagccaggcacggt

SEQ ID NO: 3471 - RNA, 20 nt, synthetic construct
  misc_feature 1..20: note = spacer sequence
  source 1..20: mol_type = other RNA
cacagattcatataaggtcc

SEQ ID NO: 3472 - RNA, 20 nt, synthetic construct
  misc_feature 1..20: note = spacer sequence
  source 1..20: mol_type = other RNA
cagattcatataaggtccca

SEQ ID NO: 3473 - RNA, 20 nt, synthetic construct
  misc_feature 1..20: note = spacer sequence
  source 1..20: mol_type = other RNA
gtgagaaggtaaaaaaaaaa

SEQ ID NO: 3474 - RNA, 20 nt, synthetic construct
  misc_feature 1..20: note = spacer sequence
  source 1..20: mol_type = other RNA
tataaggtcccactcactga

SEQ ID NO: 3475 - RNA, 20 nt, synthetic construct
  misc_feature 1..20: note = spacer sequence
  source 1..20: mol_type = other RNA
cactcactgacattctttca

SEQ ID NO: 3476 - RNA, 20 nt, synthetic construct
  misc_feature 1..20: note = spacer sequence
  source 1..20: mol_type = other RNA
ctgacattctttcaatcaca

SEQ ID NO: 3477 - RNA, 20 nt, synthetic construct
  misc_feature 1..20: note = spacer sequence
  source 1..20: mol_type = other RNA
gtgagtgggaccttatatga

SEQ ID NO: 3478 - RNA, 20 nt, synthetic construct
  misc_feature 1..20: note = spacer sequence
  source 1..20: mol_type = other RNA
ttcaatcacatcttgtttct

SEQ ID NO: 3479 - RNA, 20 nt, synthetic construct
  misc_feature 1..20: note = spacer sequence
  source 1..20: mol_type = other RNA
atcacatcttgtttctggtg

SEQ ID NO: 3480 - RNA, 20 nt, synthetic construct
  misc_feature 1..20: note = spacer sequence
  source 1..20: mol_type = other RNA
catcttgtttctggtgtaac

SEQ ID NO: 3481 - RNA, 20 nt, synthetic construct
  misc_feature 1..20: note = spacer sequence
  source 1..20: mol_type = other RNA
tgtttctggtgtaactattt

SEQ ID NO: 3482 - RNA, 20 nt, synthetic construct
  misc_feature 1..20: note = spacer sequence
  source 1..20: mol_type = other RNA
ggtgtaactatttacacttc

SEQ ID NO: 3483 - RNA, 20 nt, synthetic construct
  misc_feature 1..20: note = spacer sequence
  source 1..20: mol_type = other RNA
ctctctctctctctgttcat

SEQ ID NO: 3484 - RNA, 20 nt, synthetic construct
  misc_feature 1..20: note = spacer sequence
  source 1..20: mol_type = other RNA
ctctctctctctgttcataa

SEQ ID NO: 3485 - RNA, 20 nt, synthetic construct
  misc_feature 1..20: note = spacer sequence
  source 1..20: mol_type = other RNA
ctctctctctgttcataaat

SEQ ID NO: 3486 - RNA, 20 nt, synthetic construct
  misc_feature 1..20: note = spacer sequence
  source 1..20: mol_type = other RNA
ctctctctgttcataaattg

SEQ ID NO: 3487 - RNA, 20 nt, synthetic construct
  misc_feature 1..20: note = spacer sequence
  source 1..20: mol_type = other RNA
ctctctgttcataaattgta

SEQ ID NO: 3488 - RNA, 20 nt, synthetic construct
  misc_feature 1..20: note = spacer sequence
  source 1..20: mol_type = other RNA
ctctgttcataaattgtacc

SEQ ID NO: 3489 - RNA, 20 nt, synthetic construct
  misc_feature 1..20: note = spacer sequence
  source 1..20: mol_type = other RNA
ctgttcataaattgtaccca

SEQ ID NO: 3490 - RNA, 20 nt, synthetic construct
  misc_feature 1..20: note = spacer sequence
  source 1..20: mol_type = other RNA
gttcataaattgtacccatc

SEQ ID NO: 3491 - RNA, 20 nt, synthetic construct
  misc_feature 1..20: note = spacer sequence
  source 1..20: mol_type = other RNA
taaattgtacccatcacaag

SEQ ID NO: 3492 - RNA, 20 nt, synthetic construct
  misc_feature 1..20: note = spacer sequence
  source 1..20: mol_type = other RNA
caagtatcataatcttatta

SEQ ID NO: 3493 - RNA, 20 nt, synthetic construct
  misc_feature 1..20: note = spacer sequence
  source 1..20: mol_type = other RNA
taatcttattaaacacttcc

SEQ ID NO: 3494 - RNA, 20 nt, synthetic construct
  misc_feature 1..20: note = spacer sequence
  source 1..20: mol_type = other RNA
tattaaacacttcccatact

SEQ ID NO: 3495 - RNA, 20 nt, synthetic construct
  misc_feature 1..20: note = spacer sequence
  source 1..20: mol_type = other RNA
catactcacatagctaatag

SEQ ID NO: 3496 - RNA, 20 nt, synthetic construct
  misc_feature 1..20: note = spacer sequence
  source 1..20: mol_type = other RNA
catagctaatagccttacat

SEQ ID NO: 3497 - RNA, 20 nt, synthetic construct
  misc_feature 1..20: note = spacer sequence
  source 1..20: mol_type = other RNA
acaatgtaaggctattagct

SEQ ID NO: 3498 - RNA, 20 nt, synthetic construct
  misc_feature 1..20: note = spacer sequence
  source 1..20: mol_type = other RNA
cacaatctgttgctttaagt

SEQ ID NO: 3499 - RNA, 20 nt, synthetic construct
  misc_feature 1..20: note = spacer sequence
  source 1..20: mol_type = other RNA
gttgctttaagtttatataa

SEQ ID NO: 3500 - RNA, 20 nt, synthetic construct
  misc_feature 1..20: note = spacer sequence
  source 1..20: mol_type = other RNA
tttatataaacttaaagcaa

SEQ ID NO: 3501 - RNA, 20 nt, synthetic construct
  misc_feature 1..20: note = spacer sequence
  source 1..20: mol_type = other RNA
agttcctttcaataaaagaa

SEQ ID NO: 3502 - RNA, 20 nt, synthetic construct
  misc_feature 1..20: note = spacer sequence
  source 1..20: mol_type = other RNA
tttcaataaaagaacaacaa

SEQ ID NO: 3503 - RNA, 20 nt, synthetic construct
  misc_feature 1..20: note = spacer sequence
  source 1..20: mol_type = other RNA
ataaaagaacaacaacaata

SEQ ID NO: 3504 - RNA, 20 nt, synthetic construct
  misc_feature 1..20: note = spacer sequence
  source 1..20: mol_type = other RNA
tttattgaaaggaacttgat

SEQ ID NO: 3505 - RNA, 20 nt, synthetic construct
  misc_feature 1..20: note = spacer sequence
  source 1..20: mol_type = other RNA
ttttattgttgttgttcttt

SEQ ID NO: 3506 - RNA, 20 nt, synthetic construct
  misc_feature 1..20: note = spacer sequence
  source 1..20: mol_type = other RNA
taatctttttattgttgttg

SEQ ID NO: 3507 - RNA, 20 nt, synthetic construct
  misc_feature 1..20: note = spacer sequence
  source 1..20: mol_type = other RNA
agggctttttgtaaggtcat

SEQ ID NO: 3508 - RNA, 20 nt, synthetic construct
  misc_feature 1..20: note = spacer sequence
  source 1..20: mol_type = other RNA
aaaatagattaaataaaata

SEQ ID NO: 3509 - RNA, 20 nt, synthetic construct
  misc_feature 1..20: note = spacer sequence
  source 1..20: mol_type = other RNA
attttagacatttcaagggc

SEQ ID NO: 3510 - RNA, 20 nt, synthetic construct
  misc_feature 1..20: note = spacer sequence
  source 1..20: mol_type = other RNA
atattttatttaatctattt

SEQ ID NO: 3511 - RNA, 20 nt, synthetic construct
  misc_feature 1..20: note = spacer sequence
  source 1..20: mol_type = other RNA
acagggaataagaaacagct

SEQ ID NO: 3512 - RNA, 20 nt, synthetic construct
  misc_feature 1..20: note = spacer sequence
  source 1..20: mol_type = other RNA
ctgttgaggtgctggtctat

SEQ ID NO: 3513 - RNA, 20 nt, synthetic construct
  misc_feature 1..20: note = spacer sequence
  source 1..20: mol_type = other RNA
tattccctgttgaggtgctg

SEQ ID NO: 3514 - RNA, 20 nt, synthetic construct
  misc_feature 1..20: note = spacer sequence
  source 1..20: mol_type = other RNA
cagacttacacaaagccaat

SEQ ID NO: 3515 - RNA, 20 nt, synthetic construct
  misc_feature 1..20: note = spacer sequence
  source 1..20: mol_type = other RNA
gtgaaatgctagctgtttct

SEQ ID NO: 3516 - RNA, 20 nt, synthetic construct
  misc_feature 1..20: note = spacer sequence
  source 1..20: mol_type = other RNA
ttggctttgtgtaagtctgt

SEQ ID NO: 3517 - RNA, 20 nt, synthetic construct
  misc_feature 1..20: note = spacer sequence
  source 1..20: mol_type = other RNA
tgtgttcattggctttgtgt

SEQ ID NO: 3518 - RNA, 20 nt, synthetic construct
  misc_feature 1..20: note = spacer sequence
  source 1..20: mol_type = other RNA
ttagcatgaataatcaaata

SEQ ID NO: 3519 - RNA, 20 nt, synthetic construct
  misc_feature 1..20: note = spacer sequence
  source 1..20: mol_type = other RNA
tgctaatgagtacatgttca

SEQ ID NO: 3520 - RNA, 20 nt, synthetic construct
  misc_feature 1..20: note = spacer sequence
  source 1..20: mol_type = other RNA
aataagtagaaatttaaaat

SEQ ID NO: 3521 - RNA, 20 nt, synthetic construct
  misc_feature 1..20: note = spacer sequence
  source 1..20: mol_type = other RNA
acttatttgattattcatgc

SEQ ID NO: 3522 - RNA, 20 nt, synthetic construct
  misc_feature 1..20: note = spacer sequence
  source 1..20: mol_type = other RNA
ttttaaatttctacttattt

SEQ ID NO: 3523 - RNA, 20 nt, synthetic construct
  misc_feature 1..20: note = spacer sequence
  source 1..20: mol_type = other RNA
ttttcacctctcagattggt

SEQ ID NO: 3524 - RNA, 20 nt, synthetic construct
  misc_feature 1..20: note = spacer sequence
  source 1..20: mol_type = other RNA
cctctcagattggtaggtaa

SEQ ID NO: 3525 - RNA, 20 nt, synthetic construct
  misc_feature 1..20: note = spacer sequence
  source 1..20: mol_type = other RNA
cagattggtaggtaaagaga

SEQ ID NO: 3526 - RNA, 20 nt, synthetic construct
  misc_feature 1..20: note = spacer sequence
  source 1..20: mol_type = other RNA
gattggtaggtaaagagact

SEQ ID NO: 3527 - RNA, 20 nt, synthetic construct
  misc_feature 1..20: note = spacer sequence
  source 1..20: mol_type = other RNA
gagaggtgaaaaagaaaacc

SEQ ID NO: 3528 - RNA, 20 nt, synthetic construct
  misc_feature 1..20: note = spacer sequence
  source 1..20: mol_type = other RNA
ttacctaccaatctgagagg

SEQ ID NO: 3529 - RNA, 20 nt, synthetic construct
  misc_feature 1..20: note = spacer sequence
  source 1..20: mol_type = other RNA
ctttacctaccaatctgaga

SEQ ID NO: 3530 - RNA, 20 nt, synthetic construct
  misc_feature 1..20: note = spacer sequence
  source 1..20: mol_type = other RNA
ccaaaccataataccagtct

SEQ ID NO: 3531 - RNA, 20 nt, synthetic construct
  misc_feature 1..20: note = spacer sequence
  source 1..20: mol_type = other RNA
ctacagcctcaccaaaccat

SEQ ID NO: 3532 - RNA, 20 nt, synthetic construct
  misc_feature 1..20: note = spacer sequence
  source 1..20: mol_type = other RNA
gtttatttccctacagcctc

SEQ ID NO: 3533 - RNA, 20 nt, synthetic construct
  misc_feature 1..20: note = spacer sequence
  source 1..20: mol_type = other RNA
tactctgtttatttccctac

SEQ ID NO: 3534 - RNA, 20 nt, synthetic construct
  misc_feature 1..20: note = spacer sequence
  source 1..20: mol_type = other RNA
attcctactctgtttatttc

SEQ ID NO: 3535 - RNA, 20 nt, synthetic construct
  misc_feature 1..20: note = spacer sequence
  source 1..20: mol_type = other RNA
ttttattatttttatatatt

SEQ ID NO: 3536 - RNA, 20 nt, synthetic construct
  misc_feature 1..20: note = spacer sequence
  source 1..20: mol_type = other RNA
aaatatataaaaataataaa

SEQ ID NO: 3537 - RNA, 20 nt, synthetic construct
  misc_feature 1..20: note = spacer sequence
  source 1..20: mol_type = other RNA
caaaatatataaaaataata

SEQ ID NO: 3538 - RNA, 20 nt, synthetic construct
  misc_feature 1..20: note = spacer sequence
  source 1..20: mol_type = other RNA
tgtctcaaaatatataaaaa

SEQ ID NO: 3539 - RNA, 20 nt, synthetic construct
  misc_feature 1..20: note = spacer sequence
  source 1..20: mol_type = other RNA
cactctgtctcccaggctgg

SEQ ID NO: 3540 - RNA, 20 nt, synthetic construct
  misc_feature 1..20: note = spacer sequence
  source 1..20: mol_type = other RNA
ctctgtctcccaggctggag

SEQ ID NO: 3541 - RNA, 20 nt, synthetic construct
  misc_feature 1..20: note = spacer sequence
  source 1..20: mol_type = other RNA
gtctcccaggctggagtgca

SEQ ID NO: 3542 - RNA, 20 nt, synthetic construct
  misc_feature 1..20: note = spacer sequence
  source 1..20: mol_type = other RNA
cccaggctggagtgcagtgg

SEQ ID NO: 3543 - RNA, 20 nt, synthetic construct
  misc_feature 1..20: note = spacer sequence
  source 1..20: mol_type = other RNA
caggctggagtgcagtggcg

SEQ ID NO: 3544 - RNA, 20 nt, synthetic construct
  misc_feature 1..20: note = spacer sequence
  source 1..20: mol_type = other RNA
agcctgggagacagagtgag

SEQ ID NO: 3545 - RNA, 20 nt, synthetic construct
  misc_feature 1..20: note = spacer sequence
  source 1..20: mol_type = other RNA
cgccactgcactccagcctg

SEQ ID NO: 3546 - RNA, 20 nt, synthetic construct
  misc_feature 1..20: note = spacer sequence
  source 1..20: mol_type = other RNA
cggctcactgcaacctccgc

SEQ ID NO: 3547 - RNA, 20 nt, synthetic construct
  misc_feature 1..20: note = spacer sequence
  source 1..20: mol_type = other RNA
gctcactgcaacctccgcct

SEQ ID NO: 3548 - RNA, 20 nt, synthetic construct
  misc_feature 1..20: note = spacer sequence
  source 1..20: mol_type = other RNA
ctgcaacctccgcctcctgg

SEQ ID NO: 3549 - RNA, 20 nt, synthetic construct
  misc_feature 1..20: note = spacer sequence
  source 1..20: mol_type = other RNA
gcctcctgggttcaagtgac

SEQ ID NO: 3550 - RNA, 20 nt, synthetic construct
  misc_feature 1..20: note = spacer sequence
  source 1..20: mol_type = other RNA
tgggttcaagtgactcttgt

SEQ ID NO: 3551 - RNA, 20 nt, synthetic construct
  misc_feature 1..20: note = spacer sequence
  source 1..20: mol_type = other RNA
agtgactcttgtgcctcagc

SEQ ID NO: 3552 - RNA, 20 nt, synthetic construct
  misc_feature 1..20: note = spacer sequence
  source 1..20: mol_type = other RNA
cttgaacccaggaggcggag

SEQ ID NO: 3553 - RNA, 20 nt, synthetic construct
  misc_feature 1..20: note = spacer sequence
  source 1..20: mol_type = other RNA
tgtgcctcagcctcccgagt

SEQ ID NO: 3554 - RNA, 20 nt, synthetic construct
  misc_feature 1..20: note = spacer sequence
  source 1..20: mol_type = other RNA
gcctcccgagtagctgagat

SEQ ID NO: 3555 - RNA, 20 nt, synthetic construct
  misc_feature 1..20: note = spacer sequence
  source 1..20: mol_type = other RNA
cgagtagctgagattacagc

SEQ ID NO: 3556 - RNA, 20 nt, synthetic construct
  misc_feature 1..20: note = spacer sequence
  source 1..20: mol_type = other RNA
ggaggctgaggcacaagagt

SEQ ID NO: 3557 - RNA, 20 nt, synthetic construct
  misc_feature 1..20: note = spacer sequence
  source 1..20: mol_type = other RNA
gctactcgggaggctgaggc

SEQ ID NO: 3558 - RNA, 20 nt, synthetic construct
  misc_feature 1..20: note = spacer sequence
  source 1..20: mol_type = other RNA
cagctactcgggaggctgag

SEQ ID NO: 3559 - RNA, 20 nt, synthetic construct
  misc_feature 1..20: note = spacer sequence
  source 1..20: mol_type = other RNA
actaaaaaatacaaaaatta

SEQ ID NO: 3560 - RNA, 20 nt, synthetic construct
  misc_feature 1..20: note = spacer sequence
  source 1..20: mol_type = other RNA
ctactaaaaaatacaaaaat

SEQ ID NO: 3561 - RNA, 20 nt, synthetic construct
  misc_feature 1..20: note = spacer sequence
  source 1..20: mol_type = other RNA
tgttggccaggctgtaagca

SEQ ID NO: 3562 - RNA, 20 nt, synthetic construct
  misc_feature 1..20: note = spacer sequence
  source 1..20: mol_type = other RNA
aaatggttgtgcttacagcc

SEQ ID NO: 3563 - RNA, 20 nt, synthetic construct
  misc_feature 1..20: note = spacer sequence
  source 1..20: mol_type = other RNA
caagttgttgccaaattgtg

SEQ ID NO: 3564 - RNA, 20 nt, synthetic construct
  misc_feature 1..20: note = spacer sequence
  source 1..20: mol_type = other RNA
aagtatatatgccagctcac

SEQ ID NO: 3565 - RNA, 20 nt, synthetic construct
  misc_feature 1..20: note = spacer sequence
  source 1..20: mol_type = other RNA
cagaagcattccacaagtcc

SEQ ID NO: 3566 - RNA, 20 nt, synthetic construct
  misc_feature 1..20: note = spacer sequence
  source 1..20: mol_type = other RNA
gaagcattccacaagtccat

SEQ ID NO: 3567 - RNA, 20 nt, synthetic construct
  misc_feature 1..20: note = spacer sequence
  source 1..20: mol_type = other RNA
gagatacaaattgctcaaag

SEQ ID NO: 3568 - RNA, 20 nt, synthetic construct
  misc_feature 1..20: note = spacer sequence
  source 1..20: mol_type = other RNA
acaagtccataagaatatat

SEQ ID NO: 3569 - RNA, 20 nt, synthetic construct
  misc_feature 1..20: note = spacer sequence
  source 1..20: mol_type = other RNA
ataagaatatatacatgtcc

SEQ ID NO: 3570 - RNA, 20 nt, synthetic construct
  misc_feature 1..20: note = spacer sequence
  source 1..20: mol_type = other RNA
tatggacttgtggaatgctt

SEQ ID NO: 3571 - RNA, 20 nt, synthetic construct
  misc_feature 1..20: note = spacer sequence
  source 1..20: mol_type = other RNA
atagaaaatacacatctgtt

SEQ ID NO: 3572 - RNA, 20 nt, synthetic construct
  misc_feature 1..20: note = spacer sequence
  source 1..20: mol_type = other RNA
atggacatgtatatattctt

SEQ ID NO: 3573 - RNA, 20 nt, synthetic construct
  misc_feature 1..20: note = spacer sequence
  source 1..20: mol_type = other RNA
gttctaatagcaaataattg

SEQ ID NO: 3574 - RNA, 20 nt, synthetic construct
  misc_feature 1..20: note = spacer sequence
  source 1..20: mol_type = other RNA
aatagcaaataattgaaaac

SEQ ID NO: 3575 - RNA, 20 nt, synthetic construct
  misc_feature 1..20: note = spacer sequence
  source 1..20: mol_type = other RNA
attatttgctattagaacag

SEQ ID NO: 3576 - RNA, 20 nt, synthetic construct
  misc_feature 1..20: note = spacer sequence
  source 1..20: mol_type = other RNA
acaagtccatccataggtgt

SEQ ID NO: 3577 - RNA, 20 nt, synthetic construct
  misc_feature 1..20: note = spacer sequence
  source 1..20: mol_type = other RNA
atccataggtgtgatatgtt

SEQ ID NO: 3578 - RNA, 20 nt, synthetic construct
  misc_feature 1..20: note = spacer sequence
  source 1..20: mol_type = other RNA
ataggtgtgatatgttgaat

SEQ ID NO: 3579 - RNA, 20 nt, synthetic construct
  misc_feature 1..20: note = spacer sequence
  source 1..20: mol_type = other RNA
cacctatggatggacttgta

SEQ ID NO: 3580 - RNA, 20 nt, synthetic construct
  misc_feature 1..20: note = spacer sequence
  source 1..20: mol_type = other RNA
acatatcacacctatggatg

SEQ ID NO: 3581 - RNA, 20 nt, synthetic construct
  misc_feature 1..20: note = spacer sequence
  source 1..20: mol_type = other RNA
cctaaaaagataagtttaag

SEQ ID NO: 3582 - RNA, 20 nt, synthetic construct
  misc_feature 1..20: note = spacer sequence
  source 1..20: mol_type = other RNA
ttttaggggacacaattcaa

SEQ ID NO: 3583 - RNA, 20 nt, synthetic construct
  misc_feature 1..20: note = spacer sequence
  source 1..20: mol_type = other RNA
taatccatggcatacttgcg

SEQ ID NO: 3584 - RNA, 20 nt, synthetic construct
  misc_feature 1..20: note = spacer sequence
  source 1..20: mol_type = other RNA
atggcatacttgcgaatgtg

SEQ ID NO: 3585 - RNA, 20 nt, synthetic construct
  misc_feature 1..20: note = spacer sequence
  source 1..20: mol_type = other RNA
caagtatgccatggattagg

SEQ ID NO: 3586 - RNA, 20 nt, synthetic construct
  misc_feature 1..20: note = spacer sequence
  source 1..20: mol_type = other RNA
cattcgcaagtatgccatgg

SEQ ID NO: 3587 - RNA, 20 nt, synthetic construct
  misc_feature 1..20: note = spacer sequence
  source 1..20: mol_type = other RNA
aagtaaggtcacattcgcaa

SEQ ID NO: 3588 - RNA, 20 nt, synthetic construct
  misc_feature 1..20: note = spacer sequence
  source 1..20: mol_type = other RNA
gtgcagatgtgattagttaa

SEQ ID NO: 3589 - RNA, 20 nt, synthetic construct
  misc_feature 1..20: note = spacer sequence
  source 1..20: mol_type = other RNA
gcacagactgtatttccaag

SEQ ID NO: 3590 - RNA, 20 nt, synthetic construct
  misc_feature 1..20: note = spacer sequence
  source 1..20: mol_type = other RNA
catctgcacagactgtattt

SEQ ID NO: 3591 - RNA, 20 nt, synthetic construct
  misc_feature 1..20: note = spacer sequence
  source 1..20: mol_type = other RNA
taactaatcacatctgcaca

SEQ ID NO: 3592 - RNA, 20 nt, synthetic construct
  misc_feature 1..20: note = spacer sequence
  source 1..20: mol_type = other RNA
ccaaccttttttgcaccagg

SEQ ID NO: 3593 - RNA, 20 nt, synthetic construct
  misc_feature 1..20: note = spacer sequence
  source 1..20: mol_type = other RNA
ctggtgcaaaaaaggttggg

SEQ ID NO: 3594 - RNA, 20 nt, synthetic construct
  misc_feature 1..20: note = spacer sequence
  source 1..20: mol_type = other RNA
gtccctggtgcaaaaaaggt

SEQ ID NO: 3595 - RNA, 20 nt, synthetic construct
  misc_feature 1..20: note = spacer sequence
  source 1..20: mol_type = other RNA
tatcagtccctggtgcaaaa

SEQ ID NO: 3596 - RNA, 20 nt, synthetic construct
  misc_feature 1..20: note = spacer sequence
  source 1..20: mol_type = other RNA
catatcagtccctggtgcaa

SEQ ID NO: 3597 - RNA, 20 nt, synthetic construct
  misc_feature 1..20: note = spacer sequence
  source 1..20: mol_type = other RNA
aatgctgccactgatttgac

SEQ ID NO: 3598 - RNA, 20 nt, synthetic construct
  misc_feature 1..20: note = spacer sequence
  source 1..20: mol_type = other RNA
gtggcagcattagattctca

SEQ ID NO: 3599 - RNA, 20 nt, synthetic construct
  misc_feature 1..20: note = spacer sequence
  source 1..20: mol_type = other RNA
aatcagtggcagcattagat

SEQ ID NO: 3600 - RNA, 20 nt, synthetic construct
  misc_feature 1..20: note = spacer sequence
  source 1..20: mol_type = other RNA
tgtcaaatcagtggcagcat

SEQ ID NO: 3601 - RNA, 20 nt, synthetic construct
  misc_feature 1..20: note = spacer sequence
  source 1..20: mol_type = other RNA
gcctcctgtcaaatcagtgg

SEQ ID NO: 3602 - RNA, 20 nt, synthetic construct
  misc_feature 1..20: note = spacer sequence
  source 1..20: mol_type = other RNA
ggtggtaatacttgtcacca

SEQ ID NO: 3603 - RNA, 20 nt, synthetic construct
  misc_feature 1..20: note = spacer sequence
  source 1..20: mol_type = other RNA
ccactcacctcctgccatgt

SEQ ID NO: 3604 - RNA, 20 nt, synthetic construct
  misc_feature 1..20: note = spacer sequence
  source 1..20: mol_type = other RNA
cctcctgccatgtggcccgg

SEQ ID NO: 3605 - RNA, 20 nt, synthetic construct
  misc_feature 1..20: note = spacer sequence
  source 1..20: mol_type = other RNA
tgccatgtggcccggttcct

SEQ ID NO: 3606 - RNA, 20 nt, synthetic construct
  misc_feature 1..20: note = spacer sequence
  source 1..20: mol_type = other RNA
tagcagtccacagactggta

SEQ ID NO: 3607 - RNA, 20 nt, synthetic construct
  misc_feature 1..20: note = spacer sequence
  source 1..20: mol_type = other RNA
acagactggtactggtctgc

SEQ ID NO: 3608 - RNA, 20 nt, synthetic construct
  misc_feature 1..20: note = spacer sequence
  source 1..20: mol_type = other RNA
gtggactgctaggaaccggg

SEQ ID NO: 3609 - RNA, 20 nt, synthetic construct
  misc_feature 1..20: note = spacer sequence
  source 1..20: mol_type = other RNA
gcagcccagggattggggac

SEQ ID NO: 3610 - RNA, 20 nt, synthetic construct
  misc_feature 1..20: note = spacer sequence
  source 1..20: mol_type = other RNA
ctgggctgcagaccagtacc

SEQ ID NO: 3611 - RNA, 20 nt, synthetic construct
  misc_feature 1..20: note = spacer sequence
  source 1..20: mol_type = other RNA
ccaatccctgggctgcagac

SEQ ID NO: 3612 - RNA, 20 nt, synthetic construct
  misc_feature 1..20: note = spacer sequence
  source 1..20: mol_type = other RNA
agggtccccaatccctgggc

SEQ ID NO: 3613 - RNA, 20 nt, synthetic construct
  misc_feature 1..20: note = spacer sequence
  source 1..20: mol_type = other RNA
taactcaagggtccccaatc

SEQ ID NO: 3614 - RNA, 20 nt, synthetic construct
  misc_feature 1..20: note = spacer sequence
  source 1..20: mol_type = other RNA
tcttaactcaagggtcccca

SEQ ID NO: 3615 - RNA, 20 nt, synthetic construct
  misc_feature 1..20: note = spacer sequence
  source 1..20: mol_type = other RNA
atatgccctcatcttaactc

SEQ ID NO: 3616 - RNA, 20 nt, synthetic construct
  misc_feature 1..20: note = spacer sequence
  source 1..20: mol_type = other RNA
gatgagtggaggaacacaag

SEQ ID NO: 3617 - RNA, 20 nt, synthetic construct
  misc_feature 1..20: note = spacer sequence
  source 1..20: mol_type = other RNA
gagccatatcaatatgccct

SEQ ID NO: 3618 - RNA, 20 nt, synthetic construct
  misc_feature 1..20: note = spacer sequence
  source 1..20: mol_type = other RNA
tcggagccatatcaatatgc

SEQ ID NO: 3619 - RNA, 20 nt, synthetic construct
  misc_feature 1..20: note = spacer sequence
  source 1..20: mol_type = other RNA
actcatcggagccatatcaa

SEQ ID NO: 3620 - RNA, 20 nt, synthetic construct
  misc_feature 1..20: note = spacer sequence
  source 1..20: mol_type = other RNA
tccactcatcggagccatat

SEQ ID NO: 3621 - RNA, 20 nt, synthetic construct
  misc_feature 1..20: note = spacer sequence
  source 1..20: mol_type = other RNA
tggtcctcatgccggtttag

SEQ ID NO: 3622 - RNA, 20 nt, synthetic construct
  misc_feature 1..20: note = spacer sequence
  source 1..20: mol_type = other RNA
tcatgccggtttagataaaa

SEQ ID NO: 3623 - RNA, 20 nt, synthetic construct
  misc_feature 1..20: note = spacer sequence
  source 1..20: mol_type = other RNA
tgccggtttagataaaacaa

SEQ ID NO: 3624 - RNA, 20 nt, synthetic construct
  misc_feature 1..20: note = spacer sequence
  source 1..20: mol_type = other RNA
aaaccggcatgaggaccaag

SEQ ID NO: 3625 - RNA, 20 nt, synthetic construct
  misc_feature 1..20: note = spacer sequence
  source 1..20: mol_type = other RNA
atgttgttttatctaaaccg

SEQ ID NO: 3626 - RNA, 20 nt, synthetic construct
  misc_feature 1..20: note = spacer sequence
  source 1..20: mol_type = other RNA
acttgtgtccatgttgtttt

SEQ ID NO: 3627 - RNA, 20 nt, synthetic construct
  misc_feature 1..20: note = spacer sequence
  source 1..20: mol_type = other RNA
aaaaaaaaacaaaacaaaaa

SEQ ID NO: 3628 - RNA, 20 nt, synthetic construct
  misc_feature 1..20: note = spacer sequence
  source 1..20: mol_type = other RNA
caaaaaaaaaacaaaacaaa

SEQ ID NO: 3629 - RNA, 20 nt, synthetic construct
  misc_feature 1..20: note = spacer sequence
  source 1..20: mol_type = other RNA
gtctcaaaaaaaaaacaaaa

SEQ ID NO: 3630 - RNA, 20 nt, synthetic construct
  misc_feature 1..20: note = spacer sequence
  source 1..20: mol_type = other RNA
cgctgtcgcccaggctggag

SEQ ID NO: 3631 - RNA, 20 nt, synthetic construct
  misc_feature 1..20: note = spacer sequence
  source 1..20: mol_type = other RNA
ctgtcgcccaggctggagtg

SEQ ID NO: 3632 - RNA, 20 nt, synthetic construct
  misc_feature 1..20: note = spacer sequence
  source 1..20: mol_type = other RNA
cccaggctggagtgcagtgg

SEQ ID NO: 3633 - RNA, 20 nt, synthetic construct
  misc_feature 1..20: note = spacer sequence
  source 1..20: mol_type = other RNA
agcctgggcgacagcgagac

SEQ ID NO: 3634 - RNA, 20 nt, synthetic construct
  misc_feature 1..20: note = spacer sequence
  source 1..20: mol_type = other RNA
cggctcactgcaggctccgc

SEQ ID NO: 3635 - RNA, 20 nt, synthetic construct
  misc_feature 1..20: note = spacer sequence
  source 1..20: mol_type = other RNA
gctcactgcaggctccgccc

SEQ ID NO: 3636 - RNA, 20 nt, synthetic construct
  misc_feature 1..20: note = spacer sequence
  source 1..20: mol_type = other RNA
ctgcaggctccgccccctgg

SEQ ID NO: 3637 - RNA, 20 nt, synthetic construct
  misc_feature 1..20: note = spacer sequence
  source 1..20: mol_type = other RNA
gccccctggggttcacgcca

SEQ ID NO: 3638 - RNA, 20 nt, synthetic construct
  misc_feature 1..20: note = spacer sequence
  source 1..20: mol_type = other RNA
cgccattctcctgcctcagc

SEQ ID NO: 3639 - RNA, 20 nt, synthetic construct
  misc_feature 1..20: note = spacer sequence
  source 1..20: mol_type = other RNA
cctgcctcagcctcccgagt

SEQ ID NO: 3640 - RNA, 20 nt, synthetic construct
  misc_feature 1..20: note = spacer sequence
  source 1..20: mol_type = other RNA
tgcctcagcctcccgagtag

SEQ ID NO: 3641 - RNA, 20 nt, synthetic construct
  misc_feature 1..20: note = spacer sequence
  source 1..20: mol_type = other RNA
gcctcccgagtagctgggac

SEQ ID NO: 3642 - RNA, 20 nt, synthetic construct
  misc_feature 1..20: note = spacer sequence
  source 1..20: mol_type = other RNA
cgagtagctgggactacagg

SEQ ID NO: 3643 - RNA, 20 nt, synthetic construct
  misc_feature 1..20: note = spacer sequence
  source 1..20: mol_type = other RNA
ggaggctgaggcaggagaat

SEQ ID NO: 3644 - RNA, 20 nt, synthetic construct
  misc_feature 1..20: note = spacer sequence
  source 1..20: mol_type = other RNA
cagctactcgggaggctgag

SEQ ID NO: 3645 - RNA, 20 nt, synthetic construct
  misc_feature 1..20: note = spacer sequence
  source 1..20: mol_type = other RNA
cccggctaattttttgtatt

SEQ ID NO: 3646 - RNA, 20 nt, synthetic construct
  misc_feature 1..20: note = spacer sequence
  source 1..20: mol_type = other RNA
actaaaaatacaaaaaatta

SEQ ID NO: 3647 - RNA, 20 nt, synthetic construct
  misc_feature 1..20: note = spacer sequence
  source 1..20: mol_type = other RNA
ctactaaaaatacaaaaaat

SEQ ID NO: 3648 - RNA, 20 nt, synthetic construct
  misc_feature 1..20: note = spacer sequence
  source 1..20: mol_type = other RNA
ccgtgttagccaggatggtc

SEQ ID NO: 3649 - RNA, 20 nt, synthetic construct
  misc_feature 1..20: note = spacer sequence
  source 1..20: mol_type = other RNA
tggctaacacggtgaaaccc

SEQ ID NO: 3650 - RNA, 20 nt, synthetic construct
  misc_feature 1..20: note = spacer sequence
  source 1..20: mol_type = other RNA
cgatctcctgacctcgtgat

SEQ ID NO: 3651 - RNA, 20 nt, synthetic construct
  misc_feature 1..20: note = spacer sequence
  source 1..20: mol_type = other RNA
atctcctgacctcgtgatcc

SEQ ID NO: 3652 - RNA, 20 nt, synthetic construct
  misc_feature 1..20: note = spacer sequence
  source 1..20: mol_type = other RNA
agaccatcctggctaacacg

SEQ ID NO: 3653 - RNA, 20 nt, synthetic construct
  misc_feature 1..20: note = spacer sequence
  source 1..20: mol_type = other RNA
cctgacctcgtgatccgccc

SEQ ID NO: 3654 - RNA, 20 nt, synthetic construct
  misc_feature 1..20: note = spacer sequence
  source 1..20: mol_type = other RNA
tgacctcgtgatccgcccgc

SEQ ID NO: 3655 - RNA, 20 nt, synthetic construct
  misc_feature 1..20: note = spacer sequence
  source 1..20: mol_type = other RNA
ggagatcgagaccatcctgg

SEQ ID NO: 3656 - RNA, 20 nt, synthetic construct
  misc_feature 1..20: note = spacer sequence
  source 1..20: mol_type = other RNA
tgatccgcccgcctcggcct

SEQ ID NO: 3657 - RNA, 20 nt, synthetic construct
  misc_feature 1..20: note = spacer sequence
  source 1..20: mol_type = other RNA
cgaggtcaggagatcgagac

SEQ ID NO: 3658 - RNA, 20 nt, synthetic construct
  misc_feature 1..20: note = spacer sequence
  source 1..20: mol_type = other RNA
gcccgcctcggcctcccaaa

SEQ ID NO: 3659 - RNA, 20 nt, synthetic construct
  misc_feature 1..20: note = spacer sequence
  source 1..20: mol_type = other RNA
gcctcccaaagtgctgggat

SEQ ID NO: 3660 - RNA, 20 nt, synthetic construct
  misc_feature 1..20: note = spacer sequence
  source 1..20: mol_type = other RNA
caaagtgctgggattacagg

SEQ ID NO: 3661 - RNA, 20 nt, synthetic construct
  misc_feature 1..20: note = spacer sequence
  source 1..20: mol_type = other RNA
cagcactttgggaggccgag

SEQ ID NO: 3662 - RNA, 20 nt, synthetic construct
  misc_feature 1..20: note = spacer sequence
  source 1..20: mol_type = other RNA
cgcctgtaatcccagcactt

SEQ ID NO: 3663 - RNA, 20 nt, synthetic construct
  misc_feature 1..20: note = spacer sequence
  source 1..20: mol_type = other RNA
acggccgggcgcggtggctc

SEQ ID NO: 3664 - RNA, 20 nt, synthetic construct
  misc_feature 1..20: note = spacer sequence
  source 1..20: mol_type = other RNA
tgcctattaaacttgcctat

SEQ ID NO: 3665 - RNA, 20 nt, synthetic construct
  misc_feature 1..20: note = spacer sequence
  source 1..20: mol_type = other RNA
cttcttgcctattaaacttg

SEQ ID NO: 3666 - RNA, 20 nt, synthetic construct
  misc_feature 1..20: note = spacer sequence
  source 1..20: mol_type = other RNA
cccttcttgcctattaaact

SEQ ID NO: 3667 - RNA, 20 nt, synthetic construct
  misc_feature 1..20: note = spacer sequence
  source 1..20: mol_type = other RNA
gccttctcccttcttgccta

SEQ ID NO: 3668 - RNA, 20 nt, synthetic construct
  misc_feature 1..20: note = spacer sequence
  source 1..20: mol_type = other RNA
ttctgccttctcccttcttg

SEQ ID NO: 3669 - RNA, 20 nt, synthetic construct
  misc_feature 1..20: note = spacer sequence
  source 1..20: mol_type = other RNA
tccttctgccttctcccttc

SEQ ID NO: 3670 - RNA, 20 nt, synthetic construct
  misc_feature 1..20: note = spacer sequence
  source 1..20: mol_type = other RNA
ctcgtacagagacaagaggc

SEQ ID NO: 3671 - RNA, 20 nt, synthetic construct
  misc_feature 1..20: note = spacer sequence
  source 1..20: mol_type = other RNA
tacagagacaagaggcagag

SEQ ID NO: 3672 - RNA, 20 nt, synthetic construct
  misc_feature 1..20: note = spacer sequence
  source 1..20: mol_type = other RNA
gtacgagggagcttcttcct

SEQ ID NO: 3673 - RNA, 20 nt, synthetic construct
  misc_feature 1..20: note = spacer sequence
  source 1..20: mol_type = other RNA
ctgtacgagggagcttcttc

SEQ ID NO: 3674 - RNA, 20 nt, synthetic construct
  misc_feature 1..20: note = spacer sequence
  source 1..20: mol_type = other RNA
tgtctctgtacgagggagct

SEQ ID NO: 3675 - RNA, 20 nt, synthetic construct
  misc_feature 1..20: note = spacer sequence
  source 1..20: mol_type = other RNA
gcctcttgtctctgtacgag

SEQ ID NO: 3676 - RNA, 20 nt, synthetic construct
  misc_feature 1..20: note = spacer sequence
  source 1..20: mol_type = other RNA
ctgcctcttgtctctgtacg

SEQ ID NO: 3677 - RNA, 20 nt, synthetic construct
  misc_feature 1..20: note = spacer sequence
  source 1..20: mol_type = other RNA
aaagccgaaagagtagacac

SEQ ID NO: 3678 - RNA, 20 nt, synthetic construct
  misc_feature 1..20: note = spacer sequence
  source 1..20: mol_type = other RNA
gctttggagcctctctgcct

SEQ ID NO: 3679 - RNA, 20 nt, synthetic construct
  misc_feature 1..20: note = spacer sequence
  source 1..20: mol_type = other RNA
ttcggctttggagcctctct

SEQ ID NO: 3680 - RNA, 20 nt, synthetic construct
  misc_feature 1..20: note = spacer sequence
  source 1..20: mol_type = other RNA
actctttcggctttggagcc

SEQ ID NO: 3681 - RNA, 20 nt, synthetic construct
  misc_feature 1..20: note = spacer sequence
  source 1..20: mol_type = other RNA
acttggtgtctactctttcg

SEQ ID NO: 3682 - RNA, 20 nt, synthetic construct
  misc_feature 1..20: note = spacer sequence
  source 1..20: mol_type = other RNA
ctccacttggtgtctactct

SEQ ID NO: 3683 - RNA, 20 nt, synthetic construct
  misc_feature 1..20: note = spacer sequence
  source 1..20: mol_type = other RNA
atataaacttagctggtttt

SEQ ID NO: 3684 - RNA, 20 nt, synthetic construct
  misc_feature 1..20: note = spacer sequence
  source 1..20: mol_type = other RNA
agcctctatataaacttagc

SEQ ID NO: 3685 - RNA, 20 nt, synthetic construct
  misc_feature 1..20: note = spacer sequence
  source 1..20: mol_type = other RNA
tccagcctctatataaactt

SEQ ID NO: 3686 - RNA, 20 nt, synthetic construct
  misc_feature 1..20: note = spacer sequence
  source 1..20: mol_type = other RNA
gatttgcacagggctcaggg

SEQ ID NO: 3687 - RNA, 20 nt, synthetic construct
  misc_feature 1..20: note = spacer sequence
  source 1..20: mol_type = other RNA
gacaccgcctcctccagcct

SEQ ID NO: 3688 - RNA, 20 nt, synthetic construct
  misc_feature 1..20: note = spacer sequence
  source 1..20: mol_type = other RNA
ggggattggtttgaccaggc

SEQ ID NO: 3689 - RNA, 20 nt, synthetic construct
  misc_feature 1..20: note = spacer sequence
  source 1..20: mol_type = other RNA
cctgagccctgtgcaaatca

SEQ ID NO: 3690 - RNA, 20 nt, synthetic construct
  misc_feature 1..20: note = spacer sequence
  source 1..20: mol_type = other RNA
aaccaatcccctgagccctg

SEQ ID NO: 3691 - RNA, 20 nt, synthetic construct
  misc_feature 1..20: note = spacer sequence
  source 1..20: mol_type = other RNA
ttcacgcagcccgggaaaaa

SEQ ID NO: 3692 - RNA, 20 nt, synthetic construct
  misc_feature 1..20: note = spacer sequence
  source 1..20: mol_type = other RNA
cgcagcccgggaaaaagctg

SEQ ID NO: 3693 - RNA, 20 nt, synthetic construct
  misc_feature 1..20: note = spacer sequence
  source 1..20: mol_type = other RNA
cgggctgcgtgaatgacatg

SEQ ID NO: 3694 - RNA, 20 nt, synthetic construct
  misc_feature 1..20: note = spacer sequence
  source 1..20: mol_type = other RNA
acccaccctagccttttaat

SEQ ID NO: 3695 - RNA, 20 nt, synthetic construct
  misc_feature 1..20: note = spacer sequence
  source 1..20: mol_type = other RNA
gcatttgcatattaaaaggc

SEQ ID NO: 3696 - RNA, 20 nt, synthetic construct
  misc_feature 1..20: note = spacer sequence
  source 1..20: mol_type = other RNA
tggtgctctgcatttgcata

SEQ ID NO: 3697 - RNA, 20 nt, synthetic construct
  misc_feature 1..20: note = spacer sequence
  source 1..20: mol_type = other RNA
acacacgtggggatacgtgg

SEQ ID NO: 3698 - RNA, 20 nt, synthetic construct
  misc_feature 1..20: note = spacer sequence
  source 1..20: mol_type = other RNA
ccacgtgtgtagaacatcat

SEQ ID NO: 3699 - RNA, 20 nt, synthetic construct
  misc_feature 1..20: note = spacer sequence
  source 1..20: mol_type = other RNA
tgcccttgccccacaagtgc

SEQ ID NO: 3700 - RNA, 20 nt, synthetic construct
  misc_feature 1..20: note = spacer sequence
  source 1..20: mol_type = other RNA
tcttgcccttgccccacaag

SEQ ID NO: 3701 - RNA, 20 nt, synthetic construct
  misc_feature 1..20: note = spacer sequence
  source 1..20: mol_type = other RNA
tcttcttgcccttgccccac

SEQ ID NO: 3702 - RNA, 20 nt, synthetic construct
  misc_feature 1..20: note = spacer sequence
  source 1..20: mol_type = other RNA
caccctcttcttcttgccct

SEQ ID NO: 3703 - RNA, 20 nt, synthetic construct
  misc_feature 1..20: note = spacer sequence
  source 1..20: mol_type = other RNA
tgtttgggtagacccagttt

SEQ ID NO: 3704 - RNA, 20 nt, synthetic construct
  misc_feature 1..20: note = spacer sequence
  source 1..20: mol_type = other RNA
acccaaacatgacaattccc

SEQ ID NO: 3705 - RNA, 20 nt, synthetic construct
  misc_feature 1..20: note = spacer sequence
  source 1..20: mol_type = other RNA
aatggccagcatgtgcatat

SEQ ID NO: 3706 - RNA, 20 nt, synthetic construct
  misc_feature 1..20: note = spacer sequence
  source 1..20: mol_type = other RNA
aaggttgctggcctggctct

SEQ ID NO: 3707 - RNA, 20 nt, synthetic construct
  misc_feature 1..20: note = spacer sequence
  source 1..20: mol_type = other RNA
aagagcctgggcttgacaag

SEQ ID NO: 3708 - RNA, 20 nt, synthetic construct
  misc_feature 1..20: note = spacer sequence
  source 1..20: mol_type = other RNA
tagagccaggccagcaacct

SEQ ID NO: 3709 - RNA, 20 nt, synthetic construct
  misc_feature 1..20: note = spacer sequence
  source 1..20: mol_type = other RNA
agcccaggctcttagagcca

SEQ ID NO: 3710 - RNA, 20 nt, synthetic construct
  misc_feature 1..20: note = spacer sequence
  source 1..20: mol_type = other RNA
tgtcaagcccaggctcttag

SEQ ID NO: 3711 - RNA, 20 nt, synthetic construct
  misc_feature 1..20: note = spacer sequence
  source 1..20: mol_type = other RNA
ggaacagctttaaaaatgaa

SEQ ID NO: 3712 - RNA, 20 nt, synthetic construct
  misc_feature 1..20: note = spacer sequence
  source 1..20: mol_type = other RNA
agaaaggtttcttgtcaagc

SEQ ID NO: 3713 - RNA, 20 nt, synthetic construct
  misc_feature 1..20: note = spacer sequence
  source 1..20: mol_type = other RNA
tttttaaagctgttccagaa

SEQ ID NO: 3714 - RNA, 20 nt, synthetic construct
  misc_feature 1..20: note = spacer sequence
  source 1..20: mol_type = other RNA
caaggaccccttttcctctc

SEQ ID NO: 3715 - RNA, 20 nt, synthetic construct
  misc_feature 1..20: note = spacer sequence
  source 1..20: mol_type = other RNA
ttgggaagttttcattttta

SEQ ID NO: 3716 - RNA, 20 nt, synthetic construct
  misc_feature 1..20: note = spacer sequence
  source 1..20: mol_type = other RNA
tctctatctgcctaaaataa

SEQ ID NO: 3717 - RNA, 20 nt, synthetic construct
  misc_feature 1..20: note = spacer sequence
  source 1..20: mol_type = other RNA
ctatctgcctaaaataattt

SEQ ID NO: 3718 - RNA, 20 nt, synthetic construct
  misc_feature 1..20: note = spacer sequence
  source 1..20: mol_type = other RNA
atctgcctaaaataatttct

SEQ ID NO: 3719 - RNA, 20 nt, synthetic construct
  misc_feature 1..20: note = spacer sequence
  source 1..20: mol_type = other RNA
gcctaaaataatttcttaat

SEQ ID NO: 3720 - RNA, 20 nt, synthetic construct
  misc_feature 1..20: note = spacer sequence
  source 1..20: mol_type = other RNA
taataactcctaccacaata

SEQ ID NO: 3721 - RNA, 20 nt, synthetic construct
  misc_feature 1..20: note = spacer sequence
  source 1..20: mol_type = other RNA
taccacaatacgggattaga

SEQ ID NO: 3722 - RNA, 20 nt, synthetic construct
  misc_feature 1..20: note = spacer sequence
  source 1..20: mol_type = other RNA
cgtattgtggtaggagttat

SEQ ID NO: 3723 - RNA, 20 nt, synthetic construct
  misc_feature 1..20: note = spacer sequence
  source 1..20: mol_type = other RNA
aatcccgtattgtggtagga

SEQ ID NO: 3724 - RNA, 20 nt, synthetic construct
  misc_feature 1..20: note = spacer sequence
  source 1..20: mol_type = other RNA
actctaatcccgtattgtgg

SEQ ID NO: 3725 - RNA, 20 nt, synthetic construct
  misc_feature 1..20: note = spacer sequence
  source 1..20: mol_type = other RNA
taaacccaatgatgggtgtc

SEQ ID NO: 3726 - RNA, 20 nt, synthetic construct
  misc_feature 1..20: note = spacer sequence
  source 1..20: mol_type = other RNA
ttgggtttaggatcaactct

SEQ ID NO: 3727 - RNA, 20 nt, synthetic construct
  misc_feature 1..20: note = spacer sequence
  source 1..20: mol_type = other RNA
ttggaagaagaggagaggac

SEQ ID NO: 3728 - RNA, 20 nt, synthetic construct
  misc_feature 1..20: note = spacer sequence
  source 1..20: mol_type = other RNA
aaggacacccatcattgggt

SEQ ID NO: 3729 - RNA, 20 nt, synthetic construct
  misc_feature 1..20: note = spacer sequence
  source 1..20: mol_type = other RNA
tccaaggacacccatcattg

SEQ ID NO: 3730 - RNA, 20 nt, synthetic construct
  misc_feature 1..20: note = spacer sequence
  source 1..20: mol_type = other RNA
tcttccaaggacacccatca

SEQ ID NO: 3731 - RNA, 20 nt, synthetic construct
  misc_feature 1..20: note = spacer sequence
  source 1..20: mol_type = other RNA
tcttcttccaaggacaccca

SEQ ID NO: 3732 - RNA, 20 nt, synthetic construct
  misc_feature 1..20: note = spacer sequence
  source 1..20: mol_type = other RNA
cctcttcttccaaggacacc

SEQ ID NO: 3733 - RNA, 20 nt, synthetic construct
  misc_feature 1..20: note = spacer sequence
  source 1..20: mol_type = other RNA
tctcctcttcttccaaggac

SEQ ID NO: 3734 - RNA, 20 nt, synthetic construct
  misc_feature 1..20: note = spacer sequence
  source 1..20: mol_type = other RNA
gtgtgtcctctcctcttctt

SEQ ID NO: 3735 - RNA, 20 nt, synthetic construct
  misc_feature 1..20: note = spacer sequence
  source 1..20: mol_type = other RNA
tgtttctgtgtgtcctctcc

SEQ ID NO: 3736 - RNA, 20 nt, synthetic construct
  misc_feature 1..20: note = spacer sequence
  source 1..20: mol_type = other RNA
atatgtgtcttgtttctgtg

SEQ ID NO: 3737 - RNA, 20 nt, synthetic construct
  misc_feature 1..20: note = spacer sequence
  source 1..20: mol_type = other RNA
ctatatgtgtcttgtttctg

SEQ ID NO: 3738 - RNA, 20 nt, synthetic construct
  misc_feature 1..20: note = spacer sequence
  source 1..20: mol_type = other RNA
tctctatatgtgtcttgttt

SEQ ID NO: 3739 - RNA, 20 nt, synthetic construct
  misc_feature 1..20: note = spacer sequence
  source 1..20: mol_type = other RNA
tcctctctatatgtgtcttg

SEQ ID NO: 3740 - RNA, 20 nt, synthetic construct
  misc_feature 1..20: note = spacer sequence
  source 1..20: mol_type = other RNA
catggtcttcctctctatat

SEQ ID NO: 3741 - RNA, 20 nt, synthetic construct
  misc_feature 1..20: note = spacer sequence
  source 1..20: mol_type = other RNA
gccaatgtggtcacatggtc

SEQ ID NO: 3742 - RNA, 20 nt, synthetic construct
  misc_feature 1..20: note = spacer sequence
  source 1..20: mol_type = other RNA
ctgccaatgtggtcacatgg

SEQ ID NO: 3743 - RNA, 20 nt, synthetic construct
  misc_feature 1..20: note = spacer sequence
  source 1..20: mol_type = other RNA
caccaatctctgccaatgtg

SEQ ID NO: 3744 - RNA, 20 nt, synthetic construct
  misc_feature 1..20: note = spacer sequence
  source 1..20: mol_type = other RNA
ttggcttatggccccatcac

SEQ ID NO: 3745 - RNA, 20 nt, synthetic construct
  misc_feature 1..20: note = spacer sequence
  source 1..20: mol_type = other RNA
tggtgttcgttggcttatgg

SEQ ID NO: 3746 - RNA, 20 nt, synthetic construct
  misc_feature 1..20: note = spacer sequence
  source 1..20: mol_type = other RNA
ggtggctcctggtgttcgtt

SEQ ID NO: 3747 - RNA, 20 nt, synthetic construct
  misc_feature 1..20: note = spacer sequence
  source 1..20: mol_type = other RNA
agcttctggtggctcctggt

SEQ ID NO: 3748 - RNA, 20 nt, synthetic construct
  misc_feature 1..20: note = spacer sequence
  source 1..20: mol_type = other RNA
tctagcttctggtggctcct

SEQ ID NO: 3749 - RNA, 20 nt, synthetic construct
  misc_feature 1..20: note = spacer sequence
  source 1..20: mol_type = other RNA
cttgcctcttctagcttctg

SEQ ID NO: 3750 - RNA, 20 nt, synthetic construct
  misc_feature 1..20: note = spacer sequence
  source 1..20: mol_type = other RNA
tcccttgcctcttctagctt

SEQ ID NO: 3751 - RNA, 20 nt, synthetic construct
  misc_feature 1..20: note = spacer sequence
  source 1..20: mol_type = other RNA
tttctagagctgttagagag

SEQ ID NO: 3752 - RNA, 20 nt, synthetic construct
  misc_feature 1..20: note = spacer sequence
  source 1..20: mol_type = other RNA
agagctgttagagagactgc

SEQ ID NO: 3753 - RNA, 20 nt, synthetic construct
  misc_feature 1..20: note = spacer sequence
  source 1..20: mol_type = other RNA
agaaatgaatcctcccttgc

SEQ ID NO: 3754 - RNA, 20 nt, synthetic construct
  misc_feature 1..20: note = spacer sequence
  source 1..20: mol_type = other RNA
aacagctctagaaatgaatc

SEQ ID NO: 3755 - RNA, 20 nt, synthetic construct
  misc_feature 1..20: note = spacer sequence
  source 1..20: mol_type = other RNA
ctaacagctctagaaatgaa

SEQ ID NO: 3756 - RNA, 20 nt, synthetic construct
  misc_feature 1..20: note = spacer sequence
  source 1..20: mol_type = other RNA
ctctaacagctctagaaatg

SEQ ID NO: 3757 - RNA, 20 nt, synthetic construct
  misc_feature 1..20: note = spacer sequence
  source 1..20: mol_type = other RNA
gtggggctgcagtctctcta

SEQ ID NO: 3758 - RNA, 20 nt, synthetic construct
  misc_feature 1..20: note = spacer sequence
  source 1..20: mol_type = other RNA
cagtggggctgcagtctctc

SEQ ID NO: 3759 - RNA, 20 nt, synthetic construct
  misc_feature 1..20: note = spacer sequence
  source 1..20: mol_type = other RNA
aggtctcagtggggctgcag

SEQ ID NO: 3760 - RNA, 20 nt, synthetic construct
  misc_feature 1..20: note = spacer sequence
  source 1..20: mol_type = other RNA
gccctctagaactgtgggaa

SEQ ID NO: 3761 - RNA, 20 nt, synthetic construct
  misc_feature 1..20: note = spacer sequence
  source 1..20: mol_type = other RNA
agaactgtgggaaaataaat

SEQ ID NO: 3762 - RNA, 20 nt, synthetic construct
  misc_feature 1..20: note = spacer sequence
  source 1..20: mol_type = other RNA
agagggcggatttgcaaaat

SEQ ID NO: 3763 - RNA, 20 nt, synthetic construct
  misc_feature 1..20: note = spacer sequence
  source 1..20: mol_type = other RNA
cacagttctagagggcggat

SEQ ID NO: 3764 - RNA, 20 nt, synthetic construct
  misc_feature 1..20: note = spacer sequence
  source 1..20: mol_type = other RNA
gttgttttaagccacccaat

SEQ ID NO: 3765 - RNA, 20 nt, synthetic construct
  misc_feature 1..20: note = spacer sequence
  source 1..20: mol_type = other RNA
ataaatagtggtacaggcca

SEQ ID NO: 3766 - RNA, 20 nt, synthetic construct
  misc_feature 1..20: note = spacer sequence
  source 1..20: mol_type = other RNA
cacctgtaatctcagcactt

SEQ ID NO: 3767 - RNA, 20 nt, synthetic construct
  misc_feature 1..20: note = spacer sequence
  source 1..20: mol_type = other RNA
cagcactttgggaggccgag

SEQ ID NO: 3768 - RNA, 20 nt, synthetic construct
  misc_feature 1..20: note = spacer sequence
  source 1..20: mol_type = other RNA
gcactttgggaggccgaggt

SEQ ID NO: 3769 - RNA, 20 nt, synthetic construct
  misc_feature 1..20: note = spacer sequence
  source 1..20: mol_type = other RNA
caaagtgctgagattacagg

SEQ ID NO: 3770 - RNA, 20 nt, synthetic construct
  misc_feature 1..20: note = spacer sequence
  source 1..20: mol_type = other RNA
gcctcccaaagtgctgagat

SEQ ID NO: 3771 - RNA, 20 nt, synthetic construct
  misc_feature 1..20: note = spacer sequence
  source 1..20: mol_type = other RNA
acccacctcggcctcccaaa

SEQ ID NO: 3772 - RNA, 20 nt, synthetic construct
  misc_feature 1..20: note = spacer sequence
  source 1..20: mol_type = other RNA
agcagtccacccacctcggc

SEQ ID NO: 3773 - RNA, 20 nt, synthetic construct
  misc_feature 1..20: note = spacer sequence
  source 1..20: mol_type = other RNA
tgcctcaagcagtccaccca

SEQ ID NO: 3774 - RNA, 20 nt, synthetic construct
  misc_feature 1..20: note = spacer sequence
  source 1..20: mol_type = other RNA
agaccagcctgcccaatgtg

SEQ ID NO: 3775 - RNA, 20 nt, synthetic construct
  misc_feature 1..20: note = spacer sequence
  source 1..20: mol_type = other RNA
aactcctgcctcaagcagtc

SEQ ID NO: 3776 - RNA, 20 nt, synthetic construct
  misc_feature 1..20: note = spacer sequence
  source 1..20: mol_type = other RNA
cgaactcctgcctcaagcag

SEQ ID NO: 3777 - RNA, 20 nt, synthetic construct
  misc_feature 1..20: note = spacer sequence
  source 1..20: mol_type = other RNA
ccacattgggcaggctggtc

SEQ ID NO: 3778 - RNA, 20 nt, synthetic construct
  misc_feature 1..20: note = spacer sequence
  source 1..20: mol_type = other RNA
tctctactaaaaatacaaaa

SEQ ID NO: 3779 - RNA, 20 nt, synthetic construct
  misc_feature 1..20: note = spacer sequence
  source 1..20: mol_type = other RNA
ctactaaaaatacaaaaatt

SEQ ID NO: 3780 - RNA, 20 nt, synthetic construct
  misc_feature 1..20: note = spacer sequence
  source 1..20: mol_type = other RNA
actaaaaatacaaaaattag

SEQ ID NO: 3781 - RNA, 20 nt, synthetic construct
  misc_feature 1..20: note = spacer sequence
  source 1..20: mol_type = other RNA
cagctactctggagactgag

SEQ ID NO: 3782 - RNA, 20 nt, synthetic construct
  misc_feature 1..20: note = spacer sequence
  source 1..20: mol_type = other RNA
ggagactgaggcaggagaat

SEQ ID NO: 3783 - RNA, 20 nt, synthetic construct
  misc_feature 1..20: note = spacer sequence
  source 1..20: mol_type = other RNA
agagtagctgggactacagg

SEQ ID NO: 3784 - RNA, 20 nt, synthetic construct
  misc_feature 1..20: note = spacer sequence
  source 1..20: mol_type = other RNA
ccagagtagctgggactaca

SEQ ID NO: 3785 - RNA, 20 nt, synthetic construct
  misc_feature 1..20: note = spacer sequence
  source 1..20: mol_type = other RNA
gtctccagagtagctgggac

SEQ ID NO: 3786 - RNA, 20 nt, synthetic construct
  misc_feature 1..20: note = spacer sequence
  source 1..20: mol_type = other RNA
tgcctcagtctccagagtag

SEQ ID NO: 3787 - RNA, 20 nt, synthetic construct
  misc_feature 1..20: note = spacer sequence
  source 1..20: mol_type = other RNA
cctgcctcagtctccagagt

SEQ ID NO: 3788 - RNA, 20 nt, synthetic construct
  misc_feature 1..20: note = spacer sequence
  source 1..20: mol_type = other RNA
cttgaacccaggtggaggtt

SEQ ID NO: 3789 - RNA, 20 nt, synthetic construct
  misc_feature 1..20: note = spacer sequence
  source 1..20: mol_type = other RNA
agcgattctcctgcctcagt

SEQ ID NO: 3790 - RNA, 20 nt, synthetic construct
  misc_feature 1..20: note = spacer sequence
  source 1..20: mol_type = other RNA
acctgggttcaagcgattct

SEQ ID NO: 3791 - RNA, 20 nt, synthetic construct
  misc_feature 1..20: note = spacer sequence
  source 1..20: mol_type = other RNA
ctgcaacctccacctgggtt

SEQ ID NO: 3792 - RNA, 20 nt, synthetic construct
  misc_feature 1..20: note = spacer sequence
  source 1..20: mol_type = other RNA
tggctcactgcaacctccac

SEQ ID NO: 3793 - RNA, 20 nt, synthetic construct
  misc_feature 1..20: note = spacer sequence
  source 1..20: mol_type = other RNA
agcctggacgacagtgagac

SEQ ID NO: 3794 - RNA, 20 nt, synthetic construct
  misc_feature 1..20: note = spacer sequence
  source 1..20: mol_type = other RNA
aggctggagcacagtggcac

SEQ ID NO: 3795 - RNA, 20 nt, synthetic construct
  misc_feature 1..20: note = spacer sequence
  source 1..20: mol_type = other RNA
tccaggctggagcacagtgg

SEQ ID NO: 3796 - RNA, 20 nt, synthetic construct
  misc_feature 1..20: note = spacer sequence
  source 1..20: mol_type = other RNA
ctgtcgtccaggctggagca

SEQ ID NO: 3797 - RNA, 20 nt, synthetic construct
  misc_feature 1..20: note = spacer sequence
  source 1..20: mol_type = other RNA
cactgtcgtccaggctggag

SEQ ID NO: 3798 - RNA, 20 nt, synthetic construct
  misc_feature 1..20: note = spacer sequence
  source 1..20: mol_type = other RNA
gtctcaaataaataaataaa

SEQ ID NO: 3799 - RNA, 20 nt, synthetic construct
  misc_feature 1..20: note = spacer sequence
  source 1..20: mol_type = other RNA
caaataaataaataaataaa

SEQ ID NO: 3800 - RNA, 20 nt, synthetic construct
  misc_feature 1..20: note = spacer sequence
  source 1..20: mol_type = other RNA
aataaataaataaataaata

SEQ ID NO: 3801 - RNA, 20 nt, synthetic construct
  misc_feature 1..20: note = spacer sequence
  source 1..20: mol_type = other RNA
cgtgtatgtaccactattta

SEQ ID NO: 3802 - RNA, 20 nt, synthetic construct
  misc_feature 1..20: note = spacer sequence
  source 1..20: mol_type = other RNA
ttagtcacgtgtatgtacca

SEQ ID NO: 3803 - RNA, 20 nt, synthetic construct
  misc_feature 1..20: note = spacer sequence
  source 1..20: mol_type = other RNA
atctttagtcacgtgtatgt

SEQ ID NO: 3804 - RNA, 20 nt, synthetic construct
  misc_feature 1..20: note = spacer sequence
  source 1..20: mol_type = other RNA
cttccatctttagtcacgtg

SEQ ID NO: 3805 - RNA, 20 nt, synthetic construct
  misc_feature 1..20: note = spacer sequence
  source 1..20: mol_type = other RNA
catctattccctttttttcg

SEQ ID NO: 3806 - RNA, 20 nt, synthetic construct
  misc_feature 1..20: note = spacer sequence
  source 1..20: mol_type = other RNA
attccctttttttcgttttt

SEQ ID NO: 3807 - RNA, 20 nt, synthetic construct
  misc_feature 1..20: note = spacer sequence
  source 1..20: mol_type = other RNA
ctttttttcgtttttttttt

SEQ ID NO: 3808 - RNA, 20 nt, synthetic construct
  misc_feature 1..20: note = spacer sequence
  source 1..20: mol_type = other RNA
tttttttttttgagacgcag

SEQ ID NO: 3809 - RNA, 20 nt, synthetic construct
  misc_feature 1..20: note = spacer sequence
  source 1..20: mol_type = other RNA
aaaaaaaaaacgaaaaaaag

SEQ ID NO: 3810 - RNA, 20 nt, synthetic construct
  misc_feature 1..20: note = spacer sequence
  source 1..20: mol_type = other RNA
caaaaaaaaaaacgaaaaaa

SEQ ID NO: 3811 - RNA, 20 nt, synthetic construct
  misc_feature 1..20: note = spacer sequence
  source 1..20: mol_type = other RNA
ttgccctgttgctcaggctg

SEQ ID NO: 3812 - RNA, 20 nt, synthetic construct
  misc_feature 1..20: note = spacer sequence
  source 1..20: mol_type = other RNA
ggctggagtccagtggtgca

SEQ ID NO: 3813 - RNA, 20 nt, synthetic construct
  misc_feature 1..20: note = spacer sequence
  source 1..20: mol_type = other RNA
agcctgagcaacagggcaaa

SEQ ID NO: 3814 - RNA, 20 nt, synthetic construct
  misc_feature 1..20: note = spacer sequence
  source 1..20: mol_type = other RNA
agtggtgcaatctcggctca

SEQ ID NO: 3815 - RNA, 20 nt, synthetic construct
  misc_feature 1..20: note = spacer sequence
  source 1..20: mol_type = other RNA
cggctcacctctgcttcctg

SEQ ID NO: 3816 - RNA, 20 nt, synthetic construct
  misc_feature 1..20: note = spacer sequence
  source 1..20: mol_type = other RNA
gctcacctctgcttcctggg

SEQ ID NO: 3817 - RNA, 20 nt, synthetic construct
  misc_feature 1..20: note = spacer sequence
  source 1..20: mol_type = other RNA
cctctgcttcctgggttccg

SEQ ID NO: 3818 - RNA, 20 nt, synthetic construct
  misc_feature 1..20: note = spacer sequence
  source 1..20: mol_type = other RNA
gcttcctgggttccggagat

SEQ ID NO: 3819 - RNA, 20 nt, synthetic construct
  misc_feature 1..20: note = spacer sequence
  source 1..20: mol_type = other RNA
tgggttccggagattctcct

SEQ ID NO: 3820 - RNA, 20 nt, synthetic construct
  misc_feature 1..20: note = spacer sequence
  source 1..20: mol_type = other RNA
ggagattctcctgcctcaga

SEQ ID NO: 3821 - RNA, 20 nt, synthetic construct
  misc_feature 1..20: note = spacer sequence
  source 1..20: mol_type = other RNA
ggaacccaggaagcagaggt

SEQ ID NO: 3822 - RNA, 20 nt, synthetic construct
  misc_feature 1..20: note = spacer sequence
  source 1..20: mol_type = other RNA
ccggaacccaggaagcagag

SEQ ID NO: 3823 - RNA, 20 nt, synthetic construct
  misc_feature 1..20: note = spacer sequence
  source 1..20: mol_type = other RNA
cctgcctcagactccaagta

SEQ ID NO: 3824 - RNA, 20 nt, synthetic construct
  misc_feature 1..20: note = spacer sequence
  source 1..20: mol_type = other RNA
tgcctcagactccaagtagt

SEQ ID NO: 3825 - RNA, 20 nt, synthetic construct
  misc_feature 1..20: note = spacer sequence
  source 1..20: mol_type = other RNA
gactccaagtagttggaatt

SEQ ID NO: 3826 - RNA, 20 nt, synthetic construct
  misc_feature 1..20: note = spacer sequence
  source 1..20: mol_type = other RNA
gaggcaggagaatctccgga

SEQ ID NO: 3827 - RNA, 20 nt, synthetic construct
  misc_feature 1..20: note = spacer sequence
  source 1..20: mol_type = other RNA
aagtagttggaattacaagc

SEQ ID NO: 3828 - RNA, 20 nt, synthetic construct
  misc_feature 1..20: note = spacer sequence
  source 1..20: mol_type = other RNA
aactacttggagtctgaggc

SEQ ID NO: 3829 - RNA, 20 nt, synthetic construct
  misc_feature 1..20: note = spacer sequence
  source 1..20: mol_type = other RNA
gcctggcgtggtgtgggctt

SEQ ID NO: 3830 - RNA, 20 nt, synthetic construct
  misc_feature 1..20: note = spacer sequence
  source 1..20: mol_type = other RNA
agtaaaaatacaaaaatcag

SEQ ID NO: 3831 - RNA, 20 nt, synthetic construct
  misc_feature 1..20: note = spacer sequence
  source 1..20: mol_type = other RNA
ctagtaaaaatacaaaaatc

SEQ ID NO: 3832 - RNA, 20 nt, synthetic construct
  misc_feature 1..20: note = spacer sequence
  source 1..20: mol_type = other RNA
ctatgttggccaggctggtc

SEQ ID NO: 3833 - RNA, 20 nt, synthetic construct
  misc_feature 1..20: note = spacer sequence
  source 1..20: mol_type = other RNA
caaactcctgacctcgggtg

SEQ ID NO: 3834 - RNA, 20 nt, synthetic construct
  misc_feature 1..20: note = spacer sequence
  source 1..20: mol_type = other RNA
aactcctgacctcgggtgat

SEQ ID NO: 3835 - RNA, 20 nt, synthetic construct
  misc_feature 1..20: note = spacer sequence
  source 1..20: mol_type = other RNA
tgacctcgggtgatccgctc

SEQ ID NO: 3836 - RNA, 20 nt, synthetic construct
  misc_feature 1..20: note = spacer sequence
  source 1..20: mol_type = other RNA
ggagtttgagaccagcctgg

SEQ ID NO: 3837 - RNA, 20 nt, synthetic construct
  misc_feature 1..20: note = spacer sequence
  source 1..20: mol_type = other RNA
ggtgatccgctcaccttggc

SEQ ID NO: 3838 - RNA, 20 nt, synthetic construct
  misc_feature 1..20: note = spacer sequence
  source 1..20: mol_type = other RNA
cccgaggtcaggagtttgag

SEQ ID NO: 3839 - RNA, 20 nt, synthetic construct
  misc_feature 1..20: note = spacer sequence
  source 1..20: mol_type = other RNA
gctcaccttggcctcccaga

SEQ ID NO: 3840 - RNA, 20 nt, synthetic construct
  misc_feature 1..20: note = spacer sequence
  source 1..20: mol_type = other RNA
ccttggcctcccagagtgct

SEQ ID NO: 3841 - RNA, 20 nt, synthetic construct
  misc_feature 1..20: note = spacer sequence
  source 1..20: mol_type = other RNA
cagagtgctgggattacagg

SEQ ID NO: 3842 - RNA, 20 nt, synthetic construct
  misc_feature 1..20: note = spacer sequence
  source 1..20: mol_type = other RNA
gggaggccaaggtgagcgga

SEQ ID NO: 3843 - RNA, 20 nt, synthetic construct
  misc_feature 1..20: note = spacer sequence
  source 1..20: mol_type = other RNA
cagcactctgggaggccaag

SEQ ID NO: 3844 - RNA, 20 nt, synthetic construct
  misc_feature 1..20: note = spacer sequence
  source 1..20: mol_type = other RNA
tgcctgtaatcccagcactc

SEQ ID NO: 3845 - RNA, 20 nt, synthetic construct
  misc_feature 1..20: note = spacer sequence
  source 1..20: mol_type = other RNA
cttttatgttttggtttctg

SEQ ID NO: 3846 - RNA, 20 nt, synthetic construct
  misc_feature 1..20: note = spacer sequence
  source 1..20: mol_type = other RNA
tttatgttttggtttctgaa

SEQ ID NO: 3847 - RNA, 20 nt, synthetic construct
  misc_feature 1..20: note = spacer sequence
  source 1..20: mol_type = other RNA
gaactatgtgaaaataattt

SEQ ID NO: 3848 - RNA, 20 nt, synthetic construct
  misc_feature 1..20: note = spacer sequence
  source 1..20: mol_type = other RNA
gaaaccaaaacataaaagag

SEQ ID NO: 3849 - RNA, 20 nt, synthetic construct
  misc_feature 1..20: note = spacer sequence
  source 1..20: mol_type = other RNA
catagttcagaaaccaaaac

SEQ ID NO: 3850 - RNA, 20 nt, synthetic construct
  misc_feature 1..20: note = spacer sequence
  source 1..20: mol_type = other RNA
tgaaaataaagtacaattta

SEQ ID NO: 3851 - RNA, 20 nt, synthetic construct
  misc_feature 1..20: note = spacer sequence
  source 1..20: mol_type = other RNA
tgaaataaattattttcaca

SEQ ID NO: 3852 - RNA, 20 nt, synthetic construct
  misc_feature 1..20: note = spacer sequence
  source 1..20: mol_type = other RNA
tgcctgtaatcctagcactt

SEQ ID NO: 3853 - RNA, 20 nt, synthetic construct
  misc_feature 1..20: note = spacer sequence
  source 1..20: mol_type = other RNA
tagcactttgggaggcggag

SEQ ID NO: 3854 - RNA, 20 nt, synthetic construct
  misc_feature 1..20: note = spacer sequence
  source 1..20: mol_type = other RNA
caaagtgctaggattacagg

SEQ ID NO: 3855 - RNA, 20 nt, synthetic construct
  misc_feature 1..20: note = spacer sequence
  source 1..20: mol_type = other RNA
gcctcccaaagtgctaggat

SEQ ID NO: 3856 - RNA, 20 nt, synthetic construct
  misc_feature 1..20: note = spacer sequence
  source 1..20: mol_type = other RNA
tgcctccgcctcccaaagtg

SEQ ID NO: 3857 - RNA, 20 nt, synthetic construct
  misc_feature 1..20: note = spacer sequence
  source 1..20: mol_type = other RNA
ggggtttgataccagcctgg

SEQ ID NO: 3858 - RNA, 20 nt, synthetic construct
  misc_feature 1..20: note = spacer sequence
  source 1..20: mol_type = other RNA
aacccctgagcttaagcaat

SEQ ID NO: 3859 - RNA, 20 nt, synthetic construct
  misc_feature 1..20: note = spacer sequence
  source 1..20: mol_type = other RNA
tgaaaccccatctctacaaa

SEQ ID NO: 3860 - RNA, 20 nt, synthetic construct
  misc_feature 1..20: note = spacer sequence
  source 1..20: mol_type = other RNA
cgatgttgcccaggctggta

SEQ ID NO: 3861 - RNA, 20 nt, synthetic construct
  misc_feature 1..20: note = spacer sequence
  source 1..20: mol_type = other RNA
ctacaaaaactagccaggca

SEQ ID NO: 3862 - RNA, 20 nt, synthetic construct
  misc_feature 1..20: note = spacer sequence
  source 1..20: mol_type = other RNA
acaaaaactagccaggcatg

SEQ ID NO: 3863 - RNA, 20 nt, synthetic construct
  misc_feature 1..20: note = spacer sequence
  source 1..20: mol_type = other RNA
gtagtctcagctgctcagga

SEQ ID NO: 3864 - RNA, 20 nt, synthetic construct
  misc_feature 1..20: note = spacer sequence
  source 1..20: mol_type = other RNA
cagctgctcaggaggctgaa

SEQ ID NO: 3865 - RNA, 20 nt, synthetic construct
  misc_feature 1..20: note = spacer sequence
  source 1..20: mol_type = other RNA
gctgctcaggaggctgaaca

SEQ ID NO: 3866 - RNA, 20 nt, synthetic construct
  misc_feature 1..20: note = spacer sequence
  source 1..20: mol_type = other RNA
ggaggctgaacaggtaggat

SEQ ID NO: 3867 - RNA, 20 nt, synthetic construct
  misc_feature 1..20: note = spacer sequence
  source 1..20: mol_type = other RNA
tgagcagctgagactacaga

SEQ ID NO: 3868 - RNA, 20 nt, synthetic construct
  misc_feature 1..20: note = spacer sequence
  source 1..20: mol_type = other RNA
gcctcctgagcagctgagac

SEQ ID NO: 3869 - RNA, 20 nt, synthetic construct
  misc_feature 1..20: note = spacer sequence
  source 1..20: mol_type = other RNA
tacctgttcagcctcctgag

SEQ ID NO: 3870 - RNA, 20 nt, synthetic construct
  misc_feature 1..20: note = spacer sequence
  source 1..20: mol_type = other RNA
agcaatcctacctgttcagc

SEQ ID NO: 3871 - RNA, 20 nt, synthetic construct
  misc_feature 1..20: note = spacer sequence
  source 1..20: mol_type = other RNA
ggctcaagcaatcctacctg

SEQ ID NO: 3872 - RNA, 20 nt, synthetic construct
  misc_feature 1..20: note = spacer sequence
  source 1..20: mol_type = other RNA
caggctcaagcaatcctacc

SEQ ID NO: 3873 - RNA, 20 nt, synthetic construct
  misc_feature 1..20: note = spacer sequence
  source 1..20: mol_type = other RNA
ttgcaaccccagcctctcag

SEQ ID NO: 3874 - RNA, 20 nt, synthetic construct
  misc_feature 1..20: note = spacer sequence
  source 1..20: mol_type = other RNA
cactcattgcaaccccagcc

SEQ ID NO: 3875 - RNA, 20 nt, synthetic construct
  misc_feature 1..20: note = spacer sequence
  source 1..20: mol_type = other RNA
tgccactgtactccagcttg

SEQ ID NO: 3876 - RNA, 20 nt, synthetic construct
  misc_feature 1..20: note = spacer sequence
  source 1..20: mol_type = other RNA
agcttgggggacagagtgag

SEQ ID NO: 3877 - RNA, 20 nt, synthetic construct
  misc_feature 1..20: note = spacer sequence
  source 1..20: mol_type = other RNA
cccaagctggagtacagtgg

SEQ ID NO: 3878 - RNA, 20 nt, synthetic construct
  misc_feature 1..20: note = spacer sequence
  source 1..20: mol_type = other RNA
gtcccccaagctggagtaca

SEQ ID NO: 3879 - RNA, 20 nt, synthetic construct
  misc_feature 1..20: note = spacer sequence
  source 1..20: mol_type = other RNA
ctctgtcccccaagctggag

SEQ ID NO: 3880 - RNA, 20 nt, synthetic construct
  misc_feature 1..20: note = spacer sequence
  source 1..20: mol_type = other RNA
cactctgtcccccaagctgg

SEQ ID NO: 3881 - RNA, 20 nt, synthetic construct
  misc_feature 1..20: note = spacer sequence
  source 1..20: mol_type = other RNA
caaaaaataaataagtaaat

SEQ ID NO: 3882 - RNA, 20 nt, synthetic construct
  misc_feature 1..20: note = spacer sequence
  source 1..20: mol_type = other RNA
aaaaataaataagtaaatat

SEQ ID NO: 3883 - RNA, 20 nt, synthetic construct
  misc_feature 1..20: note = spacer sequence
  source 1..20: mol_type = other RNA
cgcctgtaatcccagcagtt

SEQ ID NO: 3884 - RNA, 20 nt, synthetic construct
  misc_feature 1..20: note = spacer sequence
  source 1..20: mol_type = other RNA
cagcagtttgtgaagctgag

SEQ ID NO: 3885 - RNA, 20 nt, synthetic construct
  misc_feature 1..20: note = spacer sequence
  source 1..20: mol_type = other RNA
caaactgctgggattacagg

SEQ ID NO: 3886 - RNA, 20 nt, synthetic construct
  misc_feature 1..20: note = spacer sequence
  source 1..20: mol_type = other RNA
gcttcacaaactgctgggat

SEQ ID NO: 3887 - RNA, 20 nt, synthetic construct
  misc_feature 1..20: note = spacer sequence
  source 1..20: mol_type = other RNA
gcctggctcagcttcacaaa

SEQ ID NO: 3888 - RNA, 20 nt, synthetic construct
  misc_feature 1..20: note = spacer sequence
  source 1..20: mol_type = other RNA
cctaaggtcaggagttcaag

SEQ ID NO: 3889 - RNA, 20 nt, synthetic construct
  misc_feature 1..20: note = spacer sequence
  source 1..20: mol_type = other RNA
ggagttcaagaccagcctgg

SEQ ID NO: 3890 - RNA, 20 nt, synthetic construct
  misc_feature 1..20: note = spacer sequence
  source 1..20: mol_type = other RNA
tgaccttaggtgatccgcct

SEQ ID NO: 3891 - RNA, 20 nt, synthetic construct
  misc_feature 1..20: note = spacer sequence
  source 1..20: mol_type = other RNA
agaccagcctggccaacatg

SEQ ID NO: 3892 - RNA, 20 nt, synthetic construct
  misc_feature 1..20: note = spacer sequence
  source 1..20: mol_type = other RNA
tgaactcctgaccttaggtg

SEQ ID NO: 3893 - RNA, 20 nt, synthetic construct
  misc_feature 1..20: note = spacer sequence
  source 1..20: mol_type = other RNA
ccatgttggccaggctggtc

SEQ ID NO: 3894 - RNA, 20 nt, synthetic construct
  misc_feature 1..20: note = spacer sequence
  source 1..20: mol_type = other RNA
ctactaaaaatacaaaaatt

SEQ ID NO: 3895 - RNA, 20 nt, synthetic construct
  misc_feature 1..20: note = spacer sequence
  source 1..20: mol_type = other RNA
actaaaaatacaaaaattag

SEQ ID NO: 3896 - RNA, 20 nt, synthetic construct
  misc_feature 1..20: note = spacer sequence
  source 1..20: mol_type = other RNA
ggctaatttttgtattttta

SEQ ID NO: 3897 - RNA, 20 nt, synthetic construct
  misc_feature 1..20: note = spacer sequence
  source 1..20: mol_type = other RNA
cagctattcaggatgctgag

SEQ ID NO: 3898 - RNA, 20 nt, synthetic construct
  misc_feature 1..20: note = spacer sequence
  source 1..20: mol_type = other RNA
ggatgctgaggcaagagaat

SEQ ID NO: 3899 - RNA, 20 nt, synthetic construct
  misc_feature 1..20: note = spacer sequence
  source 1..20: mol_type = other RNA
tgaatagctgggactacagg

SEQ ID NO: 3900 - RNA, 20 nt, synthetic construct
  misc_feature 1..20: note = spacer sequence
  source 1..20: mol_type = other RNA
gcatcctgaatagctgggac

SEQ ID NO: 3901 - RNA, 20 nt, synthetic construct
  misc_feature 1..20: note = spacer sequence
  source 1..20: mol_type = other RNA
tgcctcagcatcctgaatag

SEQ ID NO: 3902 - RNA, 20 nt, synthetic construct
  misc_feature 1..20: note = spacer sequence
  source 1..20: mol_type = other RNA
cttgcctcagcatcctgaat

SEQ ID NO: 3903 - RNA, 20 nt, synthetic construct
  misc_feature 1..20: note = spacer sequence
  source 1..20: mol_type = other RNA
acttgggaggtggaggttgc

SEQ ID NO: 3904 - RNA, 20 nt, synthetic construct
  misc_feature 1..20: note = spacer sequence
  source 1..20: mol_type = other RNA
caagttgaagcaattctctt

SEQ ID NO: 3905 - RNA, 20 nt, synthetic construct
  misc_feature 1..20: note = spacer sequence
  source 1..20: mol_type = other RNA
acctcccaagttgaagcaat

SEQ ID NO: 3906 - RNA, 20 nt, synthetic construct
  misc_feature 1..20: note = spacer sequence
  source 1..20: mol_type = other RNA
ctgcaacctccacctcccaa

SEQ ID NO: 3907 - RNA, 20 nt, synthetic construct
  misc_feature 1..20: note = spacer sequence
  source 1..20: mol_type = other RNA
tggctcactgcaacctccac

SEQ ID NO: 3908 - RNA, 20 nt, synthetic construct
  misc_feature 1..20: note = spacer sequence
  source 1..20: mol_type = other RNA
agcctgggcaacaagagcga

SEQ ID NO: 3909 - RNA, 20 nt, synthetic construct
  misc_feature 1..20: note = spacer sequence
  source 1..20: mol_type = other RNA
tgttgcccaggctggagtac

SEQ ID NO: 3910 - RNA, 20 nt, synthetic construct
  misc_feature 1..20: note = spacer sequence
  source 1..20: mol_type = other RNA
ctcttgttgcccaggctgga

SEQ ID NO: 3911 - RNA, 20 nt, synthetic construct
  misc_feature 1..20: note = spacer sequence
  source 1..20: mol_type = other RNA
gtcttgaaaataaataaatg

SEQ ID NO: 3912 - RNA, 20 nt, synthetic construct
  misc_feature 1..20: note = spacer sequence
  source 1..20: mol_type = other RNA
tgaaaataaataaatgaata

SEQ ID NO: 3913 - RNA, 20 nt, synthetic construct
  misc_feature 1..20: note = spacer sequence
  source 1..20: mol_type = other RNA
agacggagtttcgctcttgt

SEQ ID NO: 3914 - RNA, 20 nt, synthetic construct
  misc_feature 1..20: note = spacer sequence
  source 1..20: mol_type = other RNA
tttatttattttcaagacgg

SEQ ID NO: 3915 - RNA, 20 nt, synthetic construct
  misc_feature 1..20: note = spacer sequence
  source 1..20: mol_type = other RNA
catttactttattttattta

SEQ ID NO: 3916 - RNA, 20 nt, synthetic construct
  misc_feature 1..20: note = spacer sequence
  source 1..20: mol_type = other RNA
gagccttgttctatatagca

SEQ ID NO: 3917 - RNA, 20 nt, synthetic construct
  misc_feature 1..20: note = spacer sequence
  source 1..20: mol_type = other RNA
gaatcacatttactttattt

SEQ ID NO: 3918 - RNA, 20 nt, synthetic construct
  misc_feature 1..20: note = spacer sequence
  source 1..20: mol_type = other RNA
atatagcactaaaagattaa

SEQ ID NO: 3919 - RNA, 20 nt, synthetic construct
  misc_feature 1..20: note = spacer sequence
  source 1..20: mol_type = other RNA
tttagtgctatatagaacaa

SEQ ID NO: 3920 - RNA, 20 nt, synthetic construct
  misc_feature 1..20: note = spacer sequence
  source 1..20: mol_type = other RNA
aagcacatgttgtaagaaaa

SEQ ID NO: 3921 - RNA, 20 nt, synthetic construct
  misc_feature 1..20: note = spacer sequence
  source 1..20: mol_type = other RNA
tacaacatgtgctttgagtt

SEQ ID NO: 3922 - RNA, 20 nt, synthetic construct
  misc_feature 1..20: note = spacer sequence
  source 1..20: mol_type = other RNA
agttttcttacaacatgtgc

SEQ ID NO: 3923 - RNA, 20 nt, synthetic construct
  misc_feature 1..20: note = spacer sequence
  source 1..20: mol_type = other RNA
tccagttttcttacaacatg

SEQ ID NO: 3924 - RNA, 20 nt, synthetic construct
  misc_feature 1..20: note = spacer sequence
  source 1..20: mol_type = other RNA
tcttccagttttcttacaac

SEQ ID NO: 3925 - RNA, 20 nt, synthetic construct
  misc_feature 1..20: note = spacer sequence
  source 1..20: mol_type = other RNA
tcctcttccagttttcttac

SEQ ID NO: 3926 - RNA, 20 nt, synthetic construct
  misc_feature 1..20: note = spacer sequence
  source 1..20: mol_type = other RNA
cttcctcttccagttttctt

SEQ ID NO: 3927 - RNA, 20 nt, synthetic construct
  misc_feature 1..20: note = spacer sequence
  source 1..20: mol_type = other RNA
cgatcaagtagcataggaag

SEQ ID NO: 3928 - RNA, 20 nt, synthetic construct
  misc_feature 1..20: note = spacer sequence
  source 1..20: mol_type = other RNA
ggactctcttcctcttccag

SEQ ID NO: 3929 - RNA, 20 nt, synthetic construct
  misc_feature 1..20: note = spacer sequence
  source 1..20: mol_type = other RNA
agtagcataggaagaagagt

SEQ ID NO: 3930 - RNA, 20 nt, synthetic construct
  misc_feature 1..20: note = spacer sequence
  source 1..20: mol_type = other RNA
tatgctacttgatcgggact

SEQ ID NO: 3931 - RNA, 20 nt, synthetic construct
  misc_feature 1..20: note = spacer sequence
  source 1..20: mol_type = other RNA
tcctatgctacttgatcggg

SEQ ID NO: 3932 - RNA, 20 nt, synthetic construct
  misc_feature 1..20: note = spacer sequence
  source 1..20: mol_type = other RNA
tcttcctatgctacttgatc

SEQ ID NO: 3933 - RNA, 20 nt, synthetic construct
  misc_feature 1..20: note = spacer sequence
  source 1..20: mol_type = other RNA
taaaaataaaaactcttctt

SEQ ID NO: 3934 - RNA, 20 nt, synthetic construct
  misc_feature 1..20: note = spacer sequence
  source 1..20: mol_type = other RNA
tatattcataaaaataaaaa

SEQ ID NO: 3935 - RNA, 20 nt, synthetic construct
  misc_feature 1..20: note = spacer sequence
  source 1..20: mol_type = other RNA
ccatgttgcccaggctggtt

SEQ ID NO: 3936 - RNA, 20 nt, synthetic construct
  misc_feature 1..20: note = spacer sequence
  source 1..20: mol_type = other RNA
ctacaaaaaagtacaaaagt

SEQ ID NO: 3937 - RNA, 20 nt, synthetic construct
  misc_feature 1..20: note = spacer sequence
  source 1..20: mol_type = other RNA
acaaaaaagtacaaaagtac

SEQ ID NO: 3938 - RNA, 20 nt, synthetic construct
  misc_feature 1..20: note = spacer sequence
  source 1..20: mol_type = other RNA
gacgtggtggcacatacctg

SEQ ID NO: 3939 - RNA, 20 nt, synthetic construct
  misc_feature 1..20: note = spacer sequence
  source 1..20: mol_type = other RNA
gaaaaaaagtacttttgtac

SEQ ID NO: 3940 - RNA, 20 nt, synthetic construct
  misc_feature 1..20: note = spacer sequence
  source 1..20: mol_type = other RNA
cagctactccagaggctaag

SEQ ID NO: 3941 - RNA, 20 nt, synthetic construct
  misc_feature 1..20: note = spacer sequence
  source 1..20: mol_type = other RNA
agaggctaaggtgggaggat

SEQ ID NO: 3942 - RNA, 20 nt, synthetic construct
  misc_feature 1..20: note = spacer sequence
  source 1..20: mol_type = other RNA
ggagtagctgggactacagg

SEQ ID NO: 3943 - RNA, 20 nt, synthetic construct
  misc_feature 1..20: note = spacer sequence
  source 1..20: mol_type = other RNA
caccttagcctctggagtag

SEQ ID NO: 3944 - RNA, 20 nt, synthetic construct
  misc_feature 1..20: note = spacer sequence
  source 1..20: mol_type = other RNA
tcccaccttagcctctggag

SEQ ID NO: 3945 - RNA, 20 nt, synthetic construct
  misc_feature 1..20: note = spacer sequence
  source 1..20: mol_type = other RNA
cttgagcctgggagagggag

SEQ ID NO: 3946 - RNA, 20 nt, synthetic construct
  misc_feature 1..20: note = spacer sequence
  source 1..20: mol_type = other RNA
tgagcctgggagagggaggc

SEQ ID NO: 3947 - RNA, 20 nt, synthetic construct
  misc_feature 1..20: note = spacer sequence
  source 1..20: mol_type = other RNA
agagatcctcccaccttagc

SEQ ID NO: 3948 - RNA, 20 nt, synthetic construct
  misc_feature 1..20: note = spacer sequence
  source 1..20: mol_type = other RNA
caggctcaagagatcctccc

SEQ ID NO: 3949 - RNA, 20 nt, synthetic construct
  misc_feature 1..20: note = spacer sequence
  source 1..20: mol_type = other RNA
cccaggctcaagagatcctc

SEQ ID NO: 3950 - RNA, 20 nt, synthetic construct
  misc_feature 1..20: note = spacer sequence
  source 1..20: mol_type = other RNA
ctctcccaggctcaagagat

SEQ ID NO: 3951 - RNA, 20 nt, synthetic construct
  misc_feature 1..20: note = spacer sequence
  source 1..20: mol_type = other RNA
ctgcagcctccctctcccag

SEQ ID NO: 3952 - RNA, 20 nt, synthetic construct
  misc_feature 1..20: note = spacer sequence
  source 1..20: mol_type = other RNA
agcctgggcaacacagcaag

SEQ ID NO: 3953 - RNA, 20 nt, synthetic construct
  misc_feature 1..20: note = spacer sequence
  source 1..20: mol_type = other RNA
tgctgtgttgcccaggctgg

SEQ ID NO: 3954 - RNA, 20 nt, synthetic construct
  misc_feature 1..20: note = spacer sequence
  source 1..20: mol_type = other RNA
ccaaaaaaaaaaaaaaaaaa

SEQ ID NO: 3955 - RNA, 20 nt, synthetic construct
  misc_feature 1..20: note = spacer sequence
  source 1..20: mol_type = other RNA
aaaaaaaaaaaaaaaaaaaa

SEQ ID NO: 3956 - RNA, 20 nt, synthetic construct
  misc_feature 1..20: note = spacer sequence
  source 1..20: mol_type = other RNA
tttttttttttttttttttt

SEQ ID NO: 3957 - RNA, 20 nt, synthetic construct
  misc_feature 1..20: note = spacer sequence
  source 1..20: mol_type = other RNA
cttttttttttttttttttt

SEQ ID NO: 3958 - RNA, 20 nt, synthetic construct
  misc_feature 1..20: note = spacer sequence
  source 1..20: mol_type = other RNA
tattttctcttttttttttt

SEQ ID NO: 3959 - RNA, 20 nt, synthetic construct
  misc_feature 1..20: note = spacer sequence
  source 1..20: mol_type = other RNA
agggtatgcttgcttatctt

SEQ ID NO: 3960 - RNA, 20 nt, synthetic construct
  misc_feature 1..20: note = spacer sequence
  source 1..20: mol_type = other RNA
gttgaatcaagatgcatgag

SEQ ID NO: 3961 - RNA, 20 nt, synthetic construct
  misc_feature 1..20: note = spacer sequence
  source 1..20: mol_type = other RNA
acagaatgtatgctaagtac

SEQ ID NO: 3962 - RNA, 20 nt, synthetic construct
  misc_feature 1..20: note = spacer sequence
  source 1..20: mol_type = other RNA
agatgcatgagagtcttaat

SEQ ID NO: 3963 - RNA, 20 nt, synthetic construct
  misc_feature 1..20: note = spacer sequence
  source 1..20: mol_type = other RNA
tgattcaacagaatgtatgc

SEQ ID NO: 3964 - RNA, 20 nt, synthetic construct
  misc_feature 1..20: note = spacer sequence
  source 1..20: mol_type = other RNA
tgcatcttgattcaacagaa

SEQ ID NO: 3965 - RNA, 20 nt, synthetic construct
  misc_feature 1..20: note = spacer sequence
  source 1..20: mol_type = other RNA
catgcatcttgattcaacag

SEQ ID NO: 3966 - RNA, 20 nt, synthetic construct
  misc_feature 1..20: note = spacer sequence
  source 1..20: mol_type = other RNA
taatgatagtttactcatac

SEQ ID NO: 3967 - RNA, 20 nt, synthetic construct
  misc_feature 1..20: note = spacer sequence
  source 1..20: mol_type = other RNA
ttaagactctcatgcatctt

SEQ ID NO: 3968 - RNA, 20 nt, synthetic construct
  misc_feature 1..20: note = spacer sequence
  source 1..20: mol_type = other RNA
tactgtacttaatatgcaaa

SEQ ID NO: 3969 - RNA, 20 nt, synthetic construct
  misc_feature 1..20: note = spacer sequence
  source 1..20: mol_type = other RNA
aattttgcatattaagtaca

SEQ ID NO: 3970 - RNA, 20 nt, synthetic construct
  misc_feature 1..20: note = spacer sequence
  source 1..20: mol_type = other RNA
agtaagaacaatgattagat

SEQ ID NO: 3971 - RNA, 20 nt, synthetic construct
  misc_feature 1..20: note = spacer sequence
  source 1..20: mol_type = other RNA
tacttgattattctaatttt

SEQ ID NO: 3972 - RNA, 20 nt, synthetic construct
  misc_feature 1..20: note = spacer sequence
  source 1..20: mol_type = other RNA
ttgttcttacttgattattc

SEQ ID NO: 3973 - RNA, 20 nt, synthetic construct
  misc_feature 1..20: note = spacer sequence
  source 1..20: mol_type = other RNA
aatcattgttcttacttgat

SEQ ID NO: 3974 - RNA, 20 nt, synthetic construct
  misc_feature 1..20: note = spacer sequence
  source 1..20: mol_type = other RNA
aaaatgaatgccatgtgggg

SEQ ID NO: 3975 - RNA, 20 nt, synthetic construct
  misc_feature 1..20: note = spacer sequence
  source 1..20: mol_type = other RNA
ttttagaatttaaaaatggc

SEQ ID NO: 3976 - RNA, 20 nt, synthetic construct
  misc_feature 1..20: note = spacer sequence
  source 1..20: mol_type = other RNA
ccacatggcattcattttag

SEQ ID NO: 3977 - RNA, 20 nt, synthetic construct
  misc_feature 1..20: note = spacer sequence
  source 1..20: mol_type = other RNA
tccccacatggcattcattt

SEQ ID NO: 3978 - RNA, 20 nt, synthetic construct
  misc_feature 1..20: note = spacer sequence
  source 1..20: mol_type = other RNA
catccccacatggcattcat

SEQ ID NO: 3979 - RNA, 20 nt, synthetic construct
  misc_feature 1..20: note = spacer sequence
  source 1..20: mol_type = other RNA
aggccagcactctcatcccc

SEQ ID NO: 3980 - RNA, 20 nt, synthetic construct
  misc_feature 1..20: note = spacer sequence
  source 1..20: mol_type = other RNA
gaaaacctcggttcaagtct

SEQ ID NO: 3981 - RNA, 20 nt, synthetic construct
  misc_feature 1..20: note = spacer sequence
  source 1..20: mol_type = other RNA
gagttcaaggccagcactct

SEQ ID NO: 3982 - RNA, 20 nt, synthetic construct
  misc_feature 1..20: note = spacer sequence
  source 1..20: mol_type = other RNA
gttcaagtctgggtttttcc

SEQ ID NO: 3983 - RNA, 20 nt, synthetic construct
  misc_feature 1..20: note = spacer sequence
  source 1..20: mol_type = other RNA
agtctgggtttttcccattt

SEQ ID NO: 3984 - RNA, 20 nt, synthetic construct
  misc_feature 1..20: note = spacer sequence
  source 1..20: mol_type = other RNA
gggtttttcccatttctagg

SEQ ID NO: 3985 - RNA, 20 nt, synthetic construct
  misc_feature 1..20: note = spacer sequence
  source 1..20: mol_type = other RNA
catttctaggttgtgatcac

SEQ ID NO: 3986 - RNA, 20 nt, synthetic construct
  misc_feature 1..20: note = spacer sequence
  source 1..20: mol_type = other RNA
aggttgtgatcacttccctc

SEQ ID NO: 3987 - RNA, 20 nt, synthetic construct
  misc_feature 1..20: note = spacer sequence
  source 1..20: mol_type = other RNA
caacctagaaatgggaaaaa

SEQ ID NO: 3988 - RNA, 20 nt, synthetic construct
  misc_feature 1..20: note = spacer sequence
  source 1..20: mol_type = other RNA
cttccctccctgagtcctta

SEQ ID NO: 3989 - RNA, 20 nt, synthetic construct
  misc_feature 1..20: note = spacer sequence
  source 1..20: mol_type = other RNA
ctccctgagtccttaattaa

SEQ ID NO: 3990 - RNA, 20 nt, synthetic construct
  misc_feature 1..20: note = spacer sequence
  source 1..20: mol_type = other RNA
ctgagtccttaattaaaata

SEQ ID NO: 3991 - RNA, 20 nt, synthetic construct
  misc_feature 1..20: note = spacer sequence
  source 1..20: mol_type = other RNA
gggagggaagtgatcacaac

SEQ ID NO: 3992 - RNA, 20 nt, synthetic construct
  misc_feature 1..20: note = spacer sequence
  source 1..20: mol_type = other RNA
ttaattaaaatatccagttt

SEQ ID NO: 3993 - RNA, 20 nt, synthetic construct
  misc_feature 1..20: note = spacer sequence
  source 1..20: mol_type = other RNA
agtttaggccgggcgtggtg

SEQ ID NO: 3994 - RNA, 20 nt, synthetic construct
  misc_feature 1..20: note = spacer sequence
  source 1..20: mol_type = other RNA
cgcctgtaataccagcactt

SEQ ID NO: 3995 - RNA, 20 nt, synthetic construct
  misc_feature 1..20: note = spacer sequence
  source 1..20: mol_type = other RNA
aaagtgctggtattacaggc

SEQ ID NO: 3996 - RNA, 20 nt, synthetic construct
  misc_feature 1..20: note = spacer sequence
  source 1..20: mol_type = other RNA
gccctccaaagtgctggtat

SEQ ID NO: 3997 - RNA, 20 nt, synthetic construct
  misc_feature 1..20: note = spacer sequence
  source 1..20: mol_type = other RNA
acccgcctcggccctccaaa

SEQ ID NO: 3998 - RNA, 20 nt, synthetic construct
  misc_feature 1..20: note = spacer sequence
  source 1..20: mol_type = other RNA
tgaggtcaggagatcgaaac

SEQ ID NO: 3999 - RNA, 20 nt, synthetic construct
  misc_feature 1..20: note = spacer sequence
  source 1..20: mol_type = other RNA
tgatccacccgcctcggccc

SEQ ID NO: 4000 - RNA, 20 nt, synthetic construct
  misc_feature 1..20: note = spacer sequence
  source 1..20: mol_type = other RNA
ggagatcgaaaccatcctgg

SEQ ID NO: 4001 - RNA, 20 nt, synthetic construct
  misc_feature 1..20: note = spacer sequence
  source 1..20: mol_type = other RNA
tgacctcatgatccacccgc

SEQ ID NO: 4002 - RNA, 20 nt, synthetic construct
  misc_feature 1..20: note = spacer sequence
  source 1..20: mol_type = other RNA
cctgacctcatgatccaccc

SEQ ID NO: 4003 - RNA, 20 nt, synthetic construct
  misc_feature 1..20: note = spacer sequence
  source 1..20: mol_type = other RNA
aaaccatcctggctaacaca

SEQ ID NO: 4004 - RNA, 20 nt, synthetic construct
  misc_feature 1..20: note = spacer sequence
  source 1..20: mol_type = other RNA
atctcctgacctcatgatcc

SEQ ID NO: 4005 - RNA, 20 nt, synthetic construct
  misc_feature 1..20: note = spacer sequence
  source 1..20: mol_type = other RNA
tggctaacacagtgaaaccc

SEQ ID NO: 4006 - RNA, 20 nt, synthetic construct
  misc_feature 1..20: note = spacer sequence
  source 1..20: mol_type = other RNA
ctgtgttagccaggatggtt

SEQ ID NO: 4007 - RNA, 20 nt, synthetic construct
  misc_feature 1..20: note = spacer sequence
  source 1..20: mol_type = other RNA
ctactaaaaaatacaaaaaa

SEQ ID NO: 4008 - RNA, 20 nt, synthetic construct
  misc_feature 1..20: note = spacer sequence
  source 1..20: mol_type = other RNA
actaaaaaatacaaaaaatt

SEQ ID NO: 4009 - RNA, 20 nt, synthetic construct
  misc_feature 1..20: note = spacer sequence
  source 1..20: mol_type = other RNA
ccaccacgcccggctaattt

SEQ ID NO: 4010 - RNA, 20 nt, synthetic construct
  misc_feature 1..20: note = spacer sequence
  source 1..20: mol_type = other RNA
cgagtagtcccagctactcg

SEQ ID NO: 4011 - RNA, 20 nt, synthetic construct
  misc_feature 1..20: note = spacer sequence
  source 1..20: mol_type = other RNA
ggagtgctcaccaccacgcc

SEQ ID NO: 4012 - RNA, 20 nt, synthetic construct
  misc_feature 1..20: note = spacer sequence
  source 1..20: mol_type = other RNA
cagctactcgggaggctgag

SEQ ID NO: 4013 - RNA, 20 nt, synthetic construct
  misc_feature 1..20: note = spacer sequence
  source 1..20: mol_type = other RNA
ggaggctgaggcaagagaat

SEQ ID NO: 4014 - RNA, 20 nt, synthetic construct
  misc_feature 1..20: note = spacer sequence
  source 1..20: mol_type = other RNA
cgagtagctgggactactcg

SEQ ID NO: 4015 - RNA, 20 nt, synthetic construct
  misc_feature 1..20: note = spacer sequence
  source 1..20: mol_type = other RNA
gcctcccgagtagctgggac

SEQ ID NO: 4016 - RNA, 20 nt, synthetic construct
  misc_feature 1..20: note = spacer sequence
  source 1..20: mol_type = other RNA
tgcctcagcctcccgagtag

SEQ ID NO: 4017 - RNA, 20 nt, synthetic construct
  misc_feature 1..20: note = spacer sequence
  source 1..20: mol_type = other RNA
cttgcctcagcctcccgagt

SEQ ID NO: 4018 - RNA, 20 nt, synthetic construct
  misc_feature 1..20: note = spacer sequence
  source 1..20: mol_type = other RNA
caccattctcttgcctcagc

SEQ ID NO: 4019 - RNA, 20 nt, synthetic construct
  misc_feature 1..20: note = spacer sequence
  source 1..20: mol_type = other RNA
cgggttcacaccattctctt

SEQ ID NO: 4020 - RNA, 20 nt, synthetic construct
  misc_feature 1..20: note = spacer sequence
  source 1..20: mol_type = other RNA
gcctcccgggttcacaccat

SEQ ID NO: 4021 - RNA, 20 nt, synthetic construct
  misc_feature 1..20: note = spacer sequence
  source 1..20: mol_type = other RNA
gccgagatcacgccactgta

SEQ ID NO: 4022 - RNA, 20 nt, synthetic construct
  misc_feature 1..20: note = spacer sequence
  source 1..20: mol_type = other RNA
gctgactgcaagctccgcct

SEQ ID NO: 4023 - RNA, 20 nt, synthetic construct
  misc_feature 1..20: note = spacer sequence
  source 1..20: mol_type = other RNA
cggctgactgcaagctccgc

SEQ ID NO: 4024 - RNA, 20 nt, synthetic construct
  misc_feature 1..20: note = spacer sequence
  source 1..20: mol_type = other RNA
cgccactgtactccagcctg

SEQ ID NO: 4025 - RNA, 20 nt, synthetic construct
  misc_feature 1..20: note = spacer sequence
  source 1..20: mol_type = other RNA
agcctgggcgacagagtgag

SEQ ID NO: 4026 - RNA, 20 nt, synthetic construct
  misc_feature 1..20: note = spacer sequence
  source 1..20: mol_type = other RNA
cccaggctggagtacagtgg

SEQ ID NO: 4027 - RNA, 20 nt, synthetic construct
  misc_feature 1..20: note = spacer sequence
  source 1..20: mol_type = other RNA
gtcgcccaggctggagtaca

SEQ ID NO: 4028 - RNA, 20 nt, synthetic construct
  misc_feature 1..20: note = spacer sequence
  source 1..20: mol_type = other RNA
ctctgtcgcccaggctggag

SEQ ID NO: 4029 - RNA, 20 nt, synthetic construct
  misc_feature 1..20: note = spacer sequence
  source 1..20: mol_type = other RNA
cactctgtcgcccaggctgg

SEQ ID NO: 4030 - RNA, 20 nt, synthetic construct
  misc_feature 1..20: note = spacer sequence
  source 1..20: mol_type = other RNA
gtctcaaaaataaaataaaa

SEQ ID NO: 4031 - RNA, 20 nt, synthetic construct
  misc_feature 1..20: note = spacer sequence
  source 1..20: mol_type = other RNA
caaaaataaaataaaataaa

SEQ ID NO: 4032 - RNA, 20 nt, synthetic construct
  misc_feature 1..20: note = spacer sequence
  source 1..20: mol_type = other RNA
aaaataaaataaaataaaat

SEQ ID NO: 4033 - RNA, 20 nt, synthetic construct
  misc_feature 1..20: note = spacer sequence
  source 1..20: mol_type = other RNA
agtttataaatagggataac

SEQ ID NO: 4034 - RNA, 20 nt, synthetic construct
  misc_feature 1..20: note = spacer sequence
  source 1..20: mol_type = other RNA
ctatttataaactggatatt

SEQ ID NO: 4035 - RNA, 20 nt, synthetic construct
  misc_feature 1..20: note = spacer sequence
  source 1..20: mol_type = other RNA
gtctggcctgataacaaggg

SEQ ID NO: 4036 - RNA, 20 nt, synthetic construct
  misc_feature 1..20: note = spacer sequence
  source 1..20: mol_type = other RNA
ggcctgataacaagggcttg

SEQ ID NO: 4037 - RNA, 20 nt, synthetic construct
  misc_feature 1..20: note = spacer sequence
  source 1..20: mol_type = other RNA
ggccagacagatattgttat

SEQ ID NO: 4038 - RNA, 20 nt, synthetic construct
  misc_feature 1..20: note = spacer sequence
  source 1..20: mol_type = other RNA
ttattgcattttgtacttac

SEQ ID NO: 4039 - RNA, 20 nt, synthetic construct
  misc_feature 1..20: note = spacer sequence
  source 1..20: mol_type = other RNA
ccttattgcattttgtactt

SEQ ID NO: 4040 - RNA, 20 nt, synthetic construct
  misc_feature 1..20: note = spacer sequence
  source 1..20: mol_type = other RNA
tggactttgactctcagtac

SEQ ID NO: 4041 - RNA, 20 nt, synthetic construct
  misc_feature 1..20: note = spacer sequence
  source 1..20: mol_type = other RNA
atgaattgctttctccttat

SEQ ID NO: 4042 - RNA, 20 nt, synthetic construct
  misc_feature 1..20: note = spacer sequence
  source 1..20: mol_type = other RNA
aagtccatgaattgctttct

SEQ ID NO: 4043 - RNA, 20 nt, synthetic construct
  misc_feature 1..20: note = spacer sequence
  source 1..20: mol_type = other RNA
cagtacccaggaaaagtctt

SEQ ID NO: 4044 - RNA, 20 nt, synthetic construct
  misc_feature 1..20: note = spacer sequence
  source 1..20: mol_type = other RNA
gtacccaggaaaagtcttgt

SEQ ID NO: 4045 - RNA, 20 nt, synthetic construct
  misc_feature 1..20: note = spacer sequence
  source 1..20: mol_type = other RNA
tgggtactgagagtcaaagt

SEQ ID NO: 4046 - RNA, 20 nt, synthetic construct
  misc_feature 1..20: note = spacer sequence
  source 1..20: mol_type = other RNA
tgtgcgtgaaggaagaacat

SEQ ID NO: 4047 - RNA, 20 nt, synthetic construct
  misc_feature 1..20: note = spacer sequence
  source 1..20: mol_type = other RNA
cgcacaagacttttcctggg

SEQ ID NO: 4048 - RNA, 20 nt, synthetic construct
  misc_feature 1..20: note = spacer sequence
  source 1..20: mol_type = other RNA
ttcacgcacaagacttttcc

SEQ ID NO: 4049 - RNA, 20 nt, synthetic construct
  misc_feature 1..20: note = spacer sequence
  source 1..20: mol_type = other RNA
tccttcacgcacaagacttt

SEQ ID NO: 4050 - RNA, 20 nt, synthetic construct
  misc_feature 1..20: note = spacer sequence
  source 1..20: mol_type = other RNA
atgttcttccttcacgcaca

SEQ ID NO: 4051 - RNA, 20 nt, synthetic construct
  misc_feature 1..20: note = spacer sequence
  source 1..20: mol_type = other RNA
tctatgttcttccttcacgc

SEQ ID NO: 4052 - RNA, 20 nt, synthetic construct
  misc_feature 1..20: note = spacer sequence
  source 1..20: mol_type = other RNA
ttagtgataaggaccacagg

SEQ ID NO: 4053 - RNA, 20 nt, synthetic construct
  misc_feature 1..20: note = spacer sequence
  source 1..20: mol_type = other RNA
ctaatgacttcctctatgtt

SEQ ID NO: 4054 - RNA, 20 nt, synthetic construct
  misc_feature 1..20: note = spacer sequence
  source 1..20: mol_type = other RNA
ttatcactaatgacttcctc

SEQ ID NO: 4055 - RNA, 20 nt, synthetic construct
  misc_feature 1..20: note = spacer sequence
  source 1..20: mol_type = other RNA
tgccctttctggcaaagaaa

SEQ ID NO: 4056 - RNA, 20 nt, synthetic construct
  misc_feature 1..20: note = spacer sequence
  source 1..20: mol_type = other RNA
ggcaaagaaaaaggagagac

SEQ ID NO: 4057 - RNA, 20 nt, synthetic construct
  misc_feature 1..20: note = spacer sequence
  source 1..20: mol_type = other RNA
ttgccagaaagggcaggaat

SEQ ID NO: 4058 - RNA, 20 nt, synthetic construct
  misc_feature 1..20: note = spacer sequence
  source 1..20: mol_type = other RNA
tttttctttgccagaaaggg

SEQ ID NO: 4059 - RNA, 20 nt, synthetic construct
  misc_feature 1..20: note = spacer sequence
  source 1..20: mol_type = other RNA
cctttttctttgccagaaag

SEQ ID NO: 4060 - RNA, 20 nt, synthetic construct
  misc_feature 1..20: note = spacer sequence
  source 1..20: mol_type = other RNA
ctcctttttctttgccagaa

SEQ ID NO: 4061 - RNA, 20 nt, synthetic construct
  misc_feature 1..20: note = spacer sequence
  source 1..20: mol_type = other RNA
aactcaagtcatacaccaag

SEQ ID NO: 4062 - RNA, 20 nt, synthetic construct
  misc_feature 1..20: note = spacer sequence
  source 1..20: mol_type = other RNA
agtcatacaccaagtcagtc

SEQ ID NO: 4063 - RNA, 20 nt, synthetic construct
  misc_feature 1..20: note = spacer sequence
  source 1..20: mol_type = other RNA
tacaccaagtcagtcccttg

SEQ ID NO: 4064 - RNA, 20 nt, synthetic construct
  misc_feature 1..20: note = spacer sequence
  source 1..20: mol_type = other RNA
gtcccttgcactgcacattg

SEQ ID NO: 4065 - RNA, 20 nt, synthetic construct
  misc_feature 1..20: note = spacer sequence
  source 1..20: mol_type = other RNA
cttgcactgcacattgtcct

SEQ ID NO: 4066 - RNA, 20 nt, synthetic construct
  misc_feature 1..20: note = spacer sequence
  source 1..20: mol_type = other RNA
tgctgctggcactgtcctgg

SEQ ID NO: 4067 - RNA, 20 nt, synthetic construct
  misc_feature 1..20: note = spacer sequence
  source 1..20: mol_type = other RNA
tggtcttgccagtaataggt

SEQ ID NO: 4068 - RNA, 20 nt, synthetic construct
  misc_feature 1..20: note = spacer sequence
  source 1..20: mol_type = other RNA
tgccagtaataggttgggta

SEQ ID NO: 4069 - RNA, 20 nt, synthetic construct
  misc_feature 1..20: note = spacer sequence
  source 1..20: mol_type = other RNA
taatctactgcccggaactt

SEQ ID NO: 4070 - RNA, 20 nt, synthetic construct
  misc_feature 1..20: note = spacer sequence
  source 1..20: mol_type = other RNA
actgcccggaactttcagtg

SEQ ID NO: 4071 - RNA, 20 nt, synthetic construct
  misc_feature 1..20: note = spacer sequence
  source 1..20: mol_type = other RNA
gggcagtagattaggatacc

SEQ ID NO: 4072 - RNA, 20 nt, synthetic construct
  misc_feature 1..20: note = spacer sequence
  source 1..20: mol_type = other RNA
gtggtttcctcttcagttta

SEQ ID NO: 4073 - RNA, 20 nt, synthetic construct
  misc_feature 1..20: note = spacer sequence
  source 1..20: mol_type = other RNA
tcttcagtttatctagttaa

SEQ ID NO: 4074 - RNA, 20 nt, synthetic construct
  misc_feature 1..20: note = spacer sequence
  source 1..20: mol_type = other RNA
tcagtttatctagttaaatg

SEQ ID NO: 4075 - RNA, 20 nt, synthetic construct
  misc_feature 1..20: note = spacer sequence
  source 1..20: mol_type = other RNA
gtttatctagttaaatgttc

SEQ ID NO: 4076 - RNA, 20 nt, synthetic construct
  misc_feature 1..20: note = spacer sequence
  source 1..20: mol_type = other RNA
agttaaatgttcgggataat

SEQ ID NO: 4077 - RNA, 20 nt, synthetic construct
  misc_feature 1..20: note = spacer sequence
  source 1..20: mol_type = other RNA
ggataatccttcccctcggc

SEQ ID NO: 4078 - RNA, 20 nt, synthetic construct
  misc_feature 1..20: note = spacer sequence
  source 1..20: mol_type = other RNA
cgaacatttaactagataaa

SEQ ID NO: 4079 - RNA, 20 nt, synthetic construct
  misc_feature 1..20: note = spacer sequence
  source 1..20: mol_type = other RNA
ttcccctcggccccctcccc

SEQ ID NO: 4080 - RNA, 20 nt, synthetic construct
  misc_feature 1..20: note = spacer sequence
  source 1..20: mol_type = other RNA
cctcggccccctcccccaca

SEQ ID NO: 4081 - RNA, 20 nt, synthetic construct
  misc_feature 1..20: note = spacer sequence
  source 1..20: mol_type = other RNA
gccccctcccccacaagtga

SEQ ID NO: 4082 - RNA, 20 nt, synthetic construct
  misc_feature 1..20: note = spacer sequence
  source 1..20: mol_type = other RNA
cccacaagtgaagaaactcc

SEQ ID NO: 4083 - RNA, 20 nt, synthetic construct
  misc_feature 1..20: note = spacer sequence
  source 1..20: mol_type = other RNA
cttgtgggggagggggccga

SEQ ID NO: 4084 - RNA, 20 nt, synthetic construct
  misc_feature 1..20: note = spacer sequence
  source 1..20: mol_type = other RNA
tcacttgtgggggagggggc

SEQ ID NO: 4085 - RNA, 20 nt, synthetic construct
  misc_feature 1..20: note = spacer sequence
  source 1..20: mol_type = other RNA
atctcaaaatggcttcacca

SEQ ID NO: 4086 - RNA, 20 nt, synthetic construct
  misc_feature 1..20: note = spacer sequence
  source 1..20: mol_type = other RNA
caaaatggcttcaccaatgc

SEQ ID NO: 4087 - RNA, 20 nt, synthetic construct
  misc_feature 1..20: note = spacer sequence
  source 1..20: mol_type = other RNA
aaatggcttcaccaatgctg

SEQ ID NO: 4088 - RNA, 20 nt, synthetic construct
  misc_feature 1..20: note = spacer sequence
  source 1..20: mol_type = other RNA
ccaatgctgaggtgtattat

SEQ ID NO: 4089 - RNA, 20 nt, synthetic construct
  misc_feature 1..20: note = spacer sequence
  source 1..20: mol_type = other RNA
gcattggtgaagccattttg

SEQ ID NO: 4090 - RNA, 20 nt, synthetic construct
  misc_feature 1..20: note = spacer sequence
  source 1..20: mol_type = other RNA
cgcagaagaagaaatccaga

SEQ ID NO: 4091 - RNA, 20 nt, synthetic construct
  misc_feature 1..20: note = spacer sequence
  source 1..20: mol_type = other RNA
cagaagaagaaatccagaga

SEQ ID NO: 4092 - RNA, 20 nt, synthetic construct
  misc_feature 1..20: note = spacer sequence
  source 1..20: mol_type = other RNA
gcgagataatacacctcagc

SEQ ID NO: 4093 - RNA, 20 nt, synthetic construct
  misc_feature 1..20: note = spacer sequence
  source 1..20: mol_type = other RNA
tctgcgagataatacacctc

SEQ ID NO: 4094 - RNA, 20 nt, synthetic construct
  misc_feature 1..20: note = spacer sequence
  source 1..20: mol_type = other RNA
tcttctgcgagataatacac

SEQ ID NO: 4095 - RNA, 20 nt, synthetic construct
  misc_feature 1..20: note = spacer sequence
  source 1..20: mol_type = other RNA
agagaaagtgtggcttcgtg

SEQ ID NO: 4096 - RNA, 20 nt, synthetic construct
  misc_feature 1..20: note = spacer sequence
  source 1..20: mol_type = other RNA
ggatttcttcttctgcgaga

SEQ ID NO: 4097 - RNA, 20 nt, synthetic construct
  misc_feature 1..20: note = spacer sequence
  source 1..20: mol_type = other RNA
ctggatttcttcttctgcga

SEQ ID NO: 4098 - RNA, 20 nt, synthetic construct
  misc_feature 1..20: note = spacer sequence
  source 1..20: mol_type = other RNA
tgttaacaaatacatggact

SEQ ID NO: 4099 - RNA, 20 nt, synthetic construct
  misc_feature 1..20: note = spacer sequence
  source 1..20: mol_type = other RNA
atgtatttgttaacacgaag

SEQ ID NO: 4100 - RNA, 20 nt, synthetic construct
  misc_feature 1..20: note = spacer sequence
  source 1..20: mol_type = other RNA
agtccatgtatttgttaaca

SEQ ID NO: 4101 - RNA, 20 nt, synthetic construct
  misc_feature 1..20: note = spacer sequence
  source 1..20: mol_type = other RNA
tccagtccatgtatttgtta

SEQ ID NO: 4102 - RNA, 20 nt, synthetic construct
  misc_feature 1..20: note = spacer sequence
  source 1..20: mol_type = other RNA
tcttccagtccatgtatttg

SEQ ID NO: 4103 - RNA, 20 nt, synthetic construct
  misc_feature 1..20: note = spacer sequence
  source 1..20: mol_type = other RNA
gttagctctaccacttttgg

SEQ ID NO: 4104 - RNA, 20 nt, synthetic construct
  misc_feature 1..20: note = spacer sequence
  source 1..20: mol_type = other RNA
accacttttggcttgtttta

SEQ ID NO: 4105 - RNA, 20 nt, synthetic construct
  misc_feature 1..20: note = spacer sequence
  source 1..20: mol_type = other RNA
aactctcattacgtctgcaa

SEQ ID NO: 4106 - RNA, 20 nt, synthetic construct
  misc_feature 1..20: note = spacer sequence
  source 1..20: mol_type = other RNA
cattacgtctgcaagatgat

SEQ ID NO: 4107 - RNA, 20 nt, synthetic construct
  misc_feature 1..20: note = spacer sequence
  source 1..20: mol_type = other RNA
ttacgtctgcaagatgattg

SEQ ID NO: 4108 - RNA, 20 nt, synthetic construct
  misc_feature 1..20: note = spacer sequence
  source 1..20: mol_type = other RNA
gcaagatgattgctctagat

SEQ ID NO: 4109 - RNA, 20 nt, synthetic construct
  misc_feature 1..20: note = spacer sequence
  source 1..20: mol_type = other RNA
tgcagacgtaatgagagtta

SEQ ID NO: 4110 - RNA, 20 nt, synthetic construct
  misc_feature 1..20: note = spacer sequence
  source 1..20: mol_type = other RNA
tcttgcagacgtaatgagag

SEQ ID NO: 4111 - RNA, 20 nt, synthetic construct
  misc_feature 1..20: note = spacer sequence
  source 1..20: mol_type = other RNA
agatgtccaggagaagcagc

SEQ ID NO: 4112 - RNA, 20 nt, synthetic construct
  misc_feature 1..20: note = spacer sequence
  source 1..20: mol_type = other RNA
agagcaatcatcttgcagac

SEQ ID NO: 4113 - RNA, 20 nt, synthetic construct
  misc_feature 1..20: note = spacer sequence
  source 1..20: mol_type = other RNA
aggagaagcagcgagatcaa

SEQ ID NO: 4114 - RNA, 20 nt, synthetic construct
  misc_feature 1..20: note = spacer sequence
  source 1..20: mol_type = other RNA
tggacatctagagcaatcat

SEQ ID NO: 4115 - RNA, 20 nt, synthetic construct
  misc_feature 1..20: note = spacer sequence
  source 1..20: mol_type = other RNA
cctggacatctagagcaatc

SEQ ID NO: 4116 - RNA, 20 nt, synthetic construct
  misc_feature 1..20: note = spacer sequence
  source 1..20: mol_type = other RNA
ctgcttctcctggacatcta

SEQ ID NO: 4117 - RNA, 20 nt, synthetic construct
  misc_feature 1..20: note = spacer sequence
  source 1..20: mol_type = other RNA
cgctgcttctcctggacatc

SEQ ID NO: 4118 - RNA, 20 nt, synthetic construct
  misc_feature 1..20: note = spacer sequence
  source 1..20: mol_type = other RNA
agttttctttttgtgtatct

SEQ ID NO: 4119 - RNA, 20 nt, synthetic construct
  misc_feature 1..20: note = spacer sequence
  source 1..20: mol_type = other RNA
ttttgtgtatcttttttgtt

SEQ ID NO: 4120 - RNA, 20 nt, synthetic construct
  misc_feature 1..20: note = spacer sequence
  source 1..20: mol_type = other RNA
tttttgtttgtttgtttttt

SEQ ID NO: 4121 - RNA, 20 nt, synthetic construct
  misc_feature 1..20: note = spacer sequence
  source 1..20: mol_type = other RNA
aaaaacaaacaaacaaaaaa

SEQ ID NO: 4122 - RNA, 20 nt, synthetic construct
  misc_feature 1..20: note = spacer sequence
  source 1..20: mol_type = other RNA
caaaaaacaaacaaacaaaa

SEQ ID NO: 4123 - RNA, 20 nt, synthetic construct
  misc_feature 1..20: note = spacer sequence
  source 1..20: mol_type = other RNA
gtctcaaaaaacaaacaaac

SEQ ID NO: 4124 - RNA, 20 nt, synthetic construct
  misc_feature 1..20: note = spacer sequence
  source 1..20: mol_type = other RNA
gtcacccaggctggagtgca

SEQ ID NO: 4125 - RNA, 20 nt, synthetic construct
  misc_feature 1..20: note = spacer sequence
  source 1..20: mol_type = other RNA
cccaggctggagtgcagtga

SEQ ID NO: 4126 - RNA, 20 nt, synthetic construct
  misc_feature 1..20: note = spacer sequence
  source 1..20: mol_type = other RNA
agcctgggtgacagagcaag

SEQ ID NO: 4127 - RNA, 20 nt, synthetic construct
  misc_feature 1..20: note = spacer sequence
  source 1..20: mol_type = other RNA
ctgcactccagcctgggtga

SEQ ID NO: 4128 - RNA, 20 nt, synthetic construct
  misc_feature 1..20: note = spacer sequence
  source 1..20: mol_type = other RNA
catcactgcactccagcctg

SEQ ID NO: 4129 - RNA, 20 nt, synthetic construct
  misc_feature 1..20: note = spacer sequence
  source 1..20: mol_type = other RNA
cggctcactgcaacctctgt

SEQ ID NO: 4130 - RNA, 20 nt, synthetic construct
  misc_feature 1..20: note = spacer sequence
  source 1..20: mol_type = other RNA
gctcactgcaacctctgtct

SEQ ID NO: 4131 - RNA, 20 nt, synthetic construct
  misc_feature 1..20: note = spacer sequence
  source 1..20: mol_type = other RNA
ctgcaacctctgtctcccgg

SEQ ID NO: 4132 - RNA, 20 nt, synthetic construct
  misc_feature 1..20: note = spacer sequence
  source 1..20: mol_type = other RNA
gtctcccgggttcaagtgtt

SEQ ID NO: 4133 - RNA, 20 nt, synthetic construct
  misc_feature 1..20: note = spacer sequence
  source 1..20: mol_type = other RNA
cccgggttcaagtgttcttc

SEQ ID NO: 4134 - RNA, 20 nt, synthetic construct
  misc_feature 1..20: note = spacer sequence
  source 1..20: mol_type = other RNA
cgggttcaagtgttcttcct

SEQ ID NO: 4135 - RNA, 20 nt, synthetic construct
  misc_feature 1..20: note = spacer sequence
  source 1..20: mol_type = other RNA
agtgttcttcctgcctcagc

SEQ ID NO: 4136 - RNA, 20 nt, synthetic construct
  misc_feature 1..20: note = spacer sequence
  source 1..20: mol_type = other RNA
tcctgcctcagcttcccgag

SEQ ID NO: 4137 - RNA, 20 nt, synthetic construct
  misc_feature 1..20: note = spacer sequence
  source 1..20: mol_type = other RNA
tgcctcagcttcccgagtag

SEQ ID NO: 4138 - RNA, 20 nt, synthetic construct
  misc_feature 1..20: note = spacer sequence
  source 1..20: mol_type = other RNA
gcttcccgagtagctgggac

SEQ ID NO: 4139 - RNA, 20 nt, synthetic construct
  misc_feature 1..20: note = spacer sequence
  source 1..20: mol_type = other RNA
cgagtagctgggactacagg

SEQ ID NO: 4140 - RNA, 20 nt, synthetic construct
  misc_feature 1..20: note = spacer sequence
  source 1..20: mol_type = other RNA
ggaagctgaggcaggaagaa

SEQ ID NO: 4141 - RNA, 20 nt, synthetic construct
  misc_feature 1..20: note = spacer sequence
  source 1..20: mol_type = other RNA
cagctactcgggaagctgag

SEQ ID NO: 4142 - RNA, 20 nt, synthetic construct
  misc_feature 1..20: note = spacer sequence
  source 1..20: mol_type = other RNA
attaaaacatacaaaagtta

SEQ ID NO: 4143 - RNA, 20 nt, synthetic construct
  misc_feature 1..20: note = spacer sequence
  source 1..20: mol_type = other RNA
ccattaaaacatacaaaagt

SEQ ID NO: 4144 - RNA, 20 nt, synthetic construct
  misc_feature 1..20: note = spacer sequence
  source 1..20: mol_type = other RNA
gccatgttggccaggctggt

SEQ ID NO: 4145 - RNA, 20 nt, synthetic construct
  misc_feature 1..20: note = spacer sequence
  source 1..20: mol_type = other RNA
cgaactcctggcctcaggtg

SEQ ID NO: 4146 - RNA, 20 nt, synthetic construct
  misc_feature 1..20: note = spacer sequence
  source 1..20: mol_type = other RNA
aactcctggcctcaggtgat

SEQ ID NO: 4147 - RNA, 20 nt, synthetic construct
  misc_feature 1..20: note = spacer sequence
  source 1..20: mol_type = other RNA
agaccagcctggccaacatg

SEQ ID NO: 4148 - RNA, 20 nt, synthetic construct
  misc_feature 1..20: note = spacer sequence
  source 1..20: mol_type = other RNA
tggcctcaggtgatccgcct

SEQ ID NO: 4149 - RNA, 20 nt, synthetic construct
  misc_feature 1..20: note = spacer sequence
  source 1..20: mol_type = other RNA
ggtgatccgcctgcctcgga

SEQ ID NO: 4150 - RNA, 20 nt, synthetic construct
  misc_feature 1..20: note = spacer sequence
  source 1..20: mol_type = other RNA
cctgaggccaggagttcgag

SEQ ID NO: 4151 - RNA, 20 nt, synthetic construct
  misc_feature 1..20: note = spacer sequence
  source 1..20: mol_type = other RNA
gcctgcctcggacttccaaa

SEQ ID NO: 4152 - RNA, 20 nt, synthetic construct
  misc_feature 1..20: note = spacer sequence
  source 1..20: mol_type = other RNA
gacttccaaagtgctgggat

SEQ ID NO: 4153 - RNA, 20 nt, synthetic construct
  misc_feature 1..20: note = spacer sequence
  source 1..20: mol_type = other RNA
gaggcaggcggatcacctga

SEQ ID NO: 4154 - RNA, 20 nt, synthetic construct
  misc_feature 1..20: note = spacer sequence
  source 1..20: mol_type = other RNA
aaagtgctgggattacaggc

SEQ ID NO: 4155 - RNA, 20 nt, synthetic construct
  misc_feature 1..20: note = spacer sequence
  source 1..20: mol_type = other RNA
cagcactttggaagtccgag

SEQ ID NO: 4156 - RNA, 20 nt, synthetic construct
  misc_feature 1..20: note = spacer sequence
  source 1..20: mol_type = other RNA
tgcctgtaatcccagcactt

SEQ ID NO: 4157 - RNA, 20 nt, synthetic construct
  misc_feature 1..20: note = spacer sequence
  source 1..20: mol_type = other RNA
ggcatggtggctcatgcctg

SEQ ID NO: 4158 - RNA, 20 nt, synthetic construct
  misc_feature 1..20: note = spacer sequence
  source 1..20: mol_type = other RNA
ttttttttgttgtttgtttt

SEQ ID NO: 4159 - RNA, 20 nt, synthetic construct
  misc_feature 1..20: note = spacer sequence
  source 1..20: mol_type = other RNA
aaaaacaaacaacaaaaaaa

SEQ ID NO: 4160 - RNA, 20 nt, synthetic construct
  misc_feature 1..20: note = spacer sequence
  source 1..20: mol_type = other RNA
caaaaaacaaacaacaaaaa

SEQ ID NO: 4161 - RNA, 20 nt, synthetic construct
  misc_feature 1..20: note = spacer sequence
  source 1..20: mol_type = other RNA
cactctgtcacccaggctgg

SEQ ID NO: 4162 - RNA, 20 nt, synthetic construct
  misc_feature 1..20: note = spacer sequence
  source 1..20: mol_type = other RNA
ctctgtcacccaggctggag

SEQ ID NO: 4163 - RNA, 20 nt, synthetic construct
  misc_feature 1..20: note = spacer sequence
  source 1..20: mol_type = other RNA
gtcacccaggctggagtgca

SEQ ID NO: 4164 - RNA, 20 nt, synthetic construct
  misc_feature 1..20: note = spacer sequence
  source 1..20: mol_type = other RNA
cccaggctggagtgcagtgg

SEQ ID NO: 4165 - RNA, 20 nt, synthetic construct
  misc_feature 1..20: note = spacer sequence
  source 1..20: mol_type = other RNA
agcctgggtgacagagtgag

SEQ ID NO: 4166 - RNA, 20 nt, synthetic construct
  misc_feature 1..20: note = spacer sequence
  source 1..20: mol_type = other RNA
tgccactgcactccagcctg

SEQ ID NO: 4167 - RNA, 20 nt, synthetic construct
  misc_feature 1..20: note = spacer sequence
  source 1..20: mol_type = other RNA
tggctcactgcagcctccac

SEQ ID NO: 4168 - RNA, 20 nt, synthetic construct
  misc_feature 1..20: note = spacer sequence
  source 1..20: mol_type = other RNA
ctgcagcctccacctcccag

SEQ ID NO: 4169 - RNA, 20 nt, synthetic construct
  misc_feature 1..20: note = spacer sequence
  source 1..20: mol_type = other RNA
acctcccaggttcaagcaat

SEQ ID NO: 4170 - RNA, 20 nt, synthetic construct
  misc_feature 1..20: note = spacer sequence
  source 1..20: mol_type = other RNA
caggttcaagcaattcttcc

SEQ ID NO: 4171 - RNA, 20 nt, synthetic construct
  misc_feature 1..20: note = spacer sequence
  source 1..20: mol_type = other RNA
agcaattcttccacctcagc

SEQ ID NO: 4172 - RNA, 20 nt, synthetic construct
  misc_feature 1..20: note = spacer sequence
  source 1..20: mol_type = other RNA
tccacctcagcctcccgagt

SEQ ID NO: 4173 - RNA, 20 nt, synthetic construct
  misc_feature 1..20: note = spacer sequence
  source 1..20: mol_type = other RNA
acctcagcctcccgagtagc

SEQ ID NO: 4174 - RNA, 20 nt, synthetic construct
  misc_feature 1..20: note = spacer sequence
  source 1..20: mol_type = other RNA
gcctcccgagtagctgggat

SEQ ID NO: 4175 - RNA, 20 nt, synthetic construct
  misc_feature 1..20: note = spacer sequence
  source 1..20: mol_type = other RNA
cgagtagctgggattacagg

SEQ ID NO: 4176 - RNA, 20 nt, synthetic construct
  misc_feature 1..20: note = spacer sequence
  source 1..20: mol_type = other RNA
ggaggctgaggtggaagaat

SEQ ID NO: 4177 - RNA, 20 nt, synthetic construct
  misc_feature 1..20: note = spacer sequence
  source 1..20: mol_type = other RNA
cagctactcgggaggctgag

SEQ ID NO: 4178 - RNA, 20 nt, synthetic construct
  misc_feature 1..20: note = spacer sequence
  source 1..20: mol_type = other RNA
aaaaaaaaaaaagccaggca

SEQ ID NO: 4179 - RNA, 20 nt, synthetic construct
  misc_feature 1..20: note = spacer sequence
  source 1..20: mol_type = other RNA
caaaaaaaaaaaaagccagg

SEQ ID NO: 4180 - RNA, 20 nt, synthetic construct
  misc_feature 1..20: note = spacer sequence
  source 1..20: mol_type = other RNA
gtctcaaaaaaaaaaaaagc

SEQ ID NO: 4181 - RNA, 20 nt, synthetic construct
  misc_feature 1..20: note = spacer sequence
  source 1..20: mol_type = other RNA
cacactgttgcccgggctgg

SEQ ID NO: 4182 - RNA, 20 nt, synthetic construct
  misc_feature 1..20: note = spacer sequence
  source 1..20: mol_type = other RNA
cactgttgcccgggctggag

SEQ ID NO: 4183 - RNA, 20 nt, synthetic construct
  misc_feature 1..20: note = spacer sequence
  source 1..20: mol_type = other RNA
agcccgggcaacagtgtgag

SEQ ID NO: 4184 - RNA, 20 nt, synthetic construct
  misc_feature 1..20: note = spacer sequence
  source 1..20: mol_type = other RNA
tgccactgcactccagcccg

SEQ ID NO: 4185 - RNA, 20 nt, synthetic construct
  misc_feature 1..20: note = spacer sequence
  source 1..20: mol_type = other RNA
tggctcactgcagttcaagc

SEQ ID NO: 4186 - RNA, 20 nt, synthetic construct
  misc_feature 1..20: note = spacer sequence
  source 1..20: mol_type = other RNA
ctgcagttcaagcaattctc

SEQ ID NO: 4187 - RNA, 20 nt, synthetic construct
  misc_feature 1..20: note = spacer sequence
  source 1..20: mol_type = other RNA
agcaattctcctgccttagc

SEQ ID NO: 4188 - RNA, 20 nt, synthetic construct
  misc_feature 1..20: note = spacer sequence
  source 1..20: mol_type = other RNA
cctgccttagccccctgagt

SEQ ID NO: 4189 - RNA, 20 nt, synthetic construct
  misc_feature 1..20: note = spacer sequence
  source 1..20: mol_type = other RNA
tgccttagccccctgagtag

SEQ ID NO: 4190 - RNA, 20 nt, synthetic construct
  misc_feature 1..20: note = spacer sequence
  source 1..20: mol_type = other RNA
gggggctaaggcaggagaat

SEQ ID NO: 4191 - RNA, 20 nt, synthetic construct
  misc_feature 1..20: note = spacer sequence
  source 1..20: mol_type = other RNA
cagctactcagggggctaag

SEQ ID NO: 4192 - RNA, 20 nt, synthetic construct
  misc_feature 1..20: note = spacer sequence
  source 1..20: mol_type = other RNA
gctaattttttgtattttta

SEQ ID NO: 4193 - RNA, 20 nt, synthetic construct
  misc_feature 1..20: note = spacer sequence
  source 1..20: mol_type = other RNA
attaaaaatacaaaaaatta

SEQ ID NO: 4194 - RNA, 20 nt, synthetic construct
  misc_feature 1..20: note = spacer sequence
  source 1..20: mol_type = other RNA
ctattaaaaatacaaaaaat

SEQ ID NO: 4195 - RNA, 20 nt, synthetic construct
  misc_feature 1..20: note = spacer sequence
  source 1..20: mol_type = other RNA
ccatgttggccaggctggtc

SEQ ID NO: 4196 - RNA, 20 nt, synthetic construct
  misc_feature 1..20: note = spacer sequence
  source 1..20: mol_type = other RNA
cgaactcctgacctcgtgat

SEQ ID NO: 4197 - RNA, 20 nt, synthetic construct
  misc_feature 1..20: note = spacer sequence
  source 1..20: mol_type = other RNA
aactcctgacctcgtgattc

SEQ ID NO: 4198 - RNA, 20 nt, synthetic construct
  misc_feature 1..20: note = spacer sequence
  source 1..20: mol_type = other RNA
agaccagcctggccaacatg

SEQ ID NO: 4199 - RNA, 20 nt, synthetic construct
  misc_feature 1..20: note = spacer sequence
  source 1..20: mol_type = other RNA
tgacctcgtgattcgtctgc

SEQ ID NO: 4200 - RNA, 20 nt, synthetic construct
  misc_feature 1..20: note = spacer sequence
  source 1..20: mol_type = other RNA
ggagttcgagaccagcctgg

SEQ ID NO: 4201 - RNA, 20 nt, synthetic construct
  misc_feature 1..20: note = spacer sequence
  source 1..20: mol_type = other RNA
tgattcgtctgcctcggcct

SEQ ID NO: 4202 - RNA, 20 nt, synthetic construct
  misc_feature 1..20: note = spacer sequence
  source 1..20: mol_type = other RNA
cgaggtcaggagttcgagac

SEQ ID NO: 4203 - RNA, 20 nt, synthetic construct
  misc_feature 1..20: note = spacer sequence
  source 1..20: mol_type = other RNA
tctgcctcggccttccaaag

SEQ ID NO: 4204 - RNA, 20 nt, synthetic construct
  misc_feature 1..20: note = spacer sequence
  source 1..20: mol_type = other RNA
gcctcggccttccaaagtgc

SEQ ID NO: 4205 - RNA, 20 nt, synthetic construct
  misc_feature 1..20: note = spacer sequence
  source 1..20: mol_type = other RNA
gccttccaaagtgctgggag

SEQ ID NO: 4206 - RNA, 20 nt, synthetic construct
  misc_feature 1..20: note = spacer sequence
  source 1..20: mol_type = other RNA
aaagtgctgggagtacaggc

SEQ ID NO: 4207 - RNA, 20 nt, synthetic construct
  misc_feature 1..20: note = spacer sequence
  source 1..20: mol_type = other RNA
cagcactttggaaggccgag

SEQ ID NO: 4208 - RNA, 20 nt, synthetic construct
  misc_feature 1..20: note = spacer sequence
  source 1..20: mol_type = other RNA
tgcctgtactcccagcactt

SEQ ID NO: 4209 - RNA, 20 nt, synthetic construct
  misc_feature 1..20: note = spacer sequence
  source 1..20: mol_type = other RNA
tttttaaaaggaaaagaaca

SEQ ID NO: 4210 - RNA, 20 nt, synthetic construct
  misc_feature 1..20: note = spacer sequence
  source 1..20: mol_type = other RNA
ttttaaaaaagatatacagg

SEQ ID NO: 4211 - RNA, 20 nt, synthetic construct
  misc_feature 1..20: note = spacer sequence
  source 1..20: mol_type = other RNA
tttccttttaaaaaagatat

SEQ ID NO: 4212 - RNA, 20 nt, synthetic construct
  misc_feature 1..20: note = spacer sequence
  source 1..20: mol_type = other RNA
cagaagtttccaactgagtt

SEQ ID NO: 4213 - RNA, 20 nt, synthetic construct
  misc_feature 1..20: note = spacer sequence
  source 1..20: mol_type = other RNA
gggatatgttcttttccttt

SEQ ID NO: 4214 - RNA, 20 nt, synthetic construct
  misc_feature 1..20: note = spacer sequence
  source 1..20: mol_type = other RNA
aactgagtttccctctgggt

SEQ ID NO: 4215 - RNA, 20 nt, synthetic construct
  misc_feature 1..20: note = spacer sequence
  source 1..20: mol_type = other RNA
gttggaaacttctgggatat

SEQ ID NO: 4216 - RNA, 20 nt, synthetic construct
  misc_feature 1..20: note = spacer sequence
  source 1..20: mol_type = other RNA
ctctgggtcaataccagaat

SEQ ID NO: 4217 - RNA, 20 nt, synthetic construct
  misc_feature 1..20: note = spacer sequence
  source 1..20: mol_type = other RNA
gggtcaataccagaattggg

SEQ ID NO: 4218 - RNA, 20 nt, synthetic construct
  misc_feature 1..20: note = spacer sequence
  source 1..20: mol_type = other RNA
ataccagaattgggtggggg

SEQ ID NO: 4219 - RNA, 20 nt, synthetic construct
  misc_feature 1..20: note = spacer sequence
  source 1..20: mol_type = other RNA
ggtattgacccagagggaaa

SEQ ID NO: 4220 - RNA, 20 nt, synthetic construct
  misc_feature 1..20: note = spacer sequence
  source 1..20: mol_type = other RNA
tcagctcacccctaaactca

SEQ ID NO: 4221 - RNA, 20 nt, synthetic construct
  misc_feature 1..20: note = spacer sequence
  source 1..20: mol_type = other RNA
gctcacccctaaactcatca

SEQ ID NO: 4222 - RNA, 20 nt, synthetic construct
  misc_feature 1..20: note = spacer sequence
  source 1..20: mol_type = other RNA
cccctaaactcatcattgat

SEQ ID NO: 4223 - RNA, 20 nt, synthetic construct
  misc_feature 1..20: note = spacer sequence
  source 1..20: mol_type = other RNA
tcattgataagcagaatgaa

SEQ ID NO: 4224 - RNA, 20 nt, synthetic construct
  misc_feature 1..20: note = spacer sequence
  source 1..20: mol_type = other RNA
ttgataagcagaatgaatga

SEQ ID NO: 4225 - RNA, 20 nt, synthetic construct
  misc_feature 1..20: note = spacer sequence
  source 1..20: mol_type = other RNA
atgatgagtttaggggtgag

SEQ ID NO: 4226 - RNA, 20 nt, synthetic construct
  misc_feature 1..20: note = spacer sequence
  source 1..20: mol_type = other RNA
gcttatcaatgatgagttta

SEQ ID NO: 4227 - RNA, 20 nt, synthetic construct
  misc_feature 1..20: note = spacer sequence
  source 1..20: mol_type = other RNA
ttctgcttatcaatgatgag

SEQ ID NO: 4228 - RNA, 20 nt, synthetic construct
  misc_feature 1..20: note = spacer sequence
  source 1..20: mol_type = other RNA
ttcattctgcttatcaatga

SEQ ID NO: 4229 - RNA, 20 nt, synthetic construct
  misc_feature 1..20: note = spacer sequence
  source 1..20: mol_type = other RNA
aaaccagccatggtcattca

SEQ ID NO: 4230 - RNA, 20 nt, synthetic construct
  misc_feature 1..20: note = spacer sequence
  source 1..20: mol_type = other RNA
gttgtctaaaccagccatgg

SEQ ID NO: 4231 - RNA, 20 nt, synthetic construct
  misc_feature 1..20: note = spacer sequence
  source 1..20: mol_type = other RNA
gctggccacataaggaagga

SEQ ID NO: 4232 - RNA, 20 nt, synthetic construct
  misc_feature 1..20: note = spacer sequence
  source 1..20: mol_type = other RNA
ttatgtggccagcggaaatt

SEQ ID NO: 4233 - RNA, 20 nt, synthetic construct
  misc_feature 1..20: note = spacer sequence
  source 1..20: mol_type = other RNA
ttccttatgtggccagcgga

SEQ ID NO: 4234 - RNA, 20 nt, synthetic construct
  misc_feature 1..20: note = spacer sequence
  source 1..20: mol_type = other RNA
atccttccttatgtggccag

SEQ ID NO: 4235 - RNA, 20 nt, synthetic construct
  misc_feature 1..20: note = spacer sequence
  source 1..20: mol_type = other RNA
agtgtctatccttccttatg

SEQ ID NO: 4236 - RNA, 20 nt, synthetic construct
  misc_feature 1..20: note = spacer sequence
  source 1..20: mol_type = other RNA
ggtctatcagagtggaagaa

SEQ ID NO: 4237 - RNA, 20 nt, synthetic construct
  misc_feature 1..20: note = spacer sequence
  source 1..20: mol_type = other RNA
atcagagtggaagaaaggga

SEQ ID NO: 4238 - RNA, 20 nt, synthetic construct
  misc_feature 1..20: note = spacer sequence
  source 1..20: mol_type = other RNA
gagtggaagaaagggaagag

SEQ ID NO: 4239 - RNA, 20 nt, synthetic construct
  misc_feature 1..20: note = spacer sequence
  source 1..20: mol_type = other RNA
gatagacctgattttgttct

SEQ ID NO: 4240 - RNA, 20 nt, synthetic construct
  misc_feature 1..20: note = spacer sequence
  source 1..20: mol_type = other RNA
actctgatagacctgatttt

SEQ ID NO: 4241 - RNA, 20 nt, synthetic construct
  misc_feature 1..20: note = spacer sequence
  source 1..20: mol_type = other RNA
tccactctgatagacctgat

SEQ ID NO: 4242 - RNA, 20 nt, synthetic construct
  misc_feature 1..20: note = spacer sequence
  source 1..20: mol_type = other RNA
ctttcttccactctgataga

SEQ ID NO: 4243 - RNA, 20 nt, synthetic construct
  misc_feature 1..20: note = spacer sequence
  source 1..20: mol_type = other RNA
tccctttcttccactctgat

SEQ ID NO: 4244 - RNA, 20 nt, synthetic construct
  misc_feature 1..20: note = spacer sequence
  source 1..20: mol_type = other RNA
ccaccagccctcttcccttt

SEQ ID NO: 4245 - RNA, 20 nt, synthetic construct
  misc_feature 1..20: note = spacer sequence
  source 1..20: mol_type = other RNA
ttgcctccccaccagccctc

SEQ ID NO: 4246 - RNA, 20 nt, synthetic construct
  misc_feature 1..20: note = spacer sequence
  source 1..20: mol_type = other RNA
ctggcactattcattgcctc

SEQ ID NO: 4247 - RNA, 20 nt, synthetic construct
  misc_feature 1..20: note = spacer sequence
  source 1..20: mol_type = other RNA
agttcgctggcactattcat

SEQ ID NO: 4248 - RNA, 20 nt, synthetic construct
  misc_feature 1..20: note = spacer sequence
  source 1..20: mol_type = other RNA
tcctgacatttcggttctgc

SEQ ID NO: 4249 - RNA, 20 nt, synthetic construct
  misc_feature 1..20: note = spacer sequence
  source 1..20: mol_type = other RNA
tgacatttcggttctgctct

SEQ ID NO: 4250 - RNA, 20 nt, synthetic construct
  misc_feature 1..20: note = spacer sequence
  source 1..20: mol_type = other RNA
ggatgattttccagttcgct

SEQ ID NO: 4251 - RNA, 20 nt, synthetic construct
  misc_feature 1..20: note = spacer sequence
  source 1..20: mol_type = other RNA
gttctgctctttgactacgg

SEQ ID NO: 4252 - RNA, 20 nt, synthetic construct
  misc_feature 1..20: note = spacer sequence
  source 1..20: mol_type = other RNA
gctctttgactacggtaact

SEQ ID NO: 4253 - RNA, 20 nt, synthetic construct
  misc_feature 1..20: note = spacer sequence
  source 1..20: mol_type = other RNA
ttgactacggtaactgtgtg

SEQ ID NO: 4254 - RNA, 20 nt, synthetic construct
  misc_feature 1..20: note = spacer sequence
  source 1..20: mol_type = other RNA
aagagcagaaccgaaatgtc

SEQ ID NO: 4255 - RNA, 20 nt, synthetic construct
  misc_feature 1..20: note = spacer sequence
  source 1..20: mol_type = other RNA
ccttttaacttacacacagt

SEQ ID NO: 4256 - RNA, 20 nt, synthetic construct
  misc_feature 1..20: note = spacer sequence
  source 1..20: mol_type = other RNA
atccatcattacctttctta

SEQ ID NO: 4257 - RNA, 20 nt, synthetic construct
  misc_feature 1..20: note = spacer sequence
  source 1..20: mol_type = other RNA
atcattacctttcttatctc

SEQ ID NO: 4258 - RNA, 20 nt, synthetic construct
  misc_feature 1..20: note = spacer sequence
  source 1..20: mol_type = other RNA
ttacctttcttatctcagat

SEQ ID NO: 4259 - RNA, 20 nt, synthetic construct
  misc_feature 1..20: note = spacer sequence
  source 1..20: mol_type = other RNA
tatctcagatagctaagaga

SEQ ID NO: 4260 - RNA, 20 nt, synthetic construct
  misc_feature 1..20: note = spacer sequence
  source 1..20: mol_type = other RNA
cagatagctaagagacatca

SEQ ID NO: 4261 - RNA, 20 nt, synthetic construct
  misc_feature 1..20: note = spacer sequence
  source 1..20: mol_type = other RNA
gatagctaagagacatcatg

SEQ ID NO: 4262 - RNA, 20 nt, synthetic construct
  misc_feature 1..20: note = spacer sequence
  source 1..20: mol_type = other RNA
gagataagaaaggtaatgat

SEQ ID NO: 4263 - RNA, 20 nt, synthetic construct
  misc_feature 1..20: note = spacer sequence
  source 1..20: mol_type = other RNA
tagctatctgagataagaaa

SEQ ID NO: 4264 - RNA, 20 nt, synthetic construct
  misc_feature 1..20: note = spacer sequence
  source 1..20: mol_type = other RNA
cttagctatctgagataaga

SEQ ID NO: 4265 - RNA, 20 nt, synthetic construct
  misc_feature 1..20: note = spacer sequence
  source 1..20: mol_type = other RNA
tgaacttaactgtgtccaaa

SEQ ID NO: 4266 - RNA, 20 nt, synthetic construct
  misc_feature 1..20: note = spacer sequence
  source 1..20: mol_type = other RNA
tgatgtctcttagctatctg

SEQ ID NO: 4267 - RNA, 20 nt, synthetic construct
  misc_feature 1..20: note = spacer sequence
  source 1..20: mol_type = other RNA
aaaatgaaactactggtctt

SEQ ID NO: 4268 - RNA, 20 nt, synthetic construct
  misc_feature 1..20: note = spacer sequence
  source 1..20: mol_type = other RNA
ttttggacacagttaagttc

SEQ ID NO: 4269 - RNA, 20 nt, synthetic construct
  misc_feature 1..20: note = spacer sequence
  source 1..20: mol_type = other RNA
tcttcctcacatctgctcca

SEQ ID NO: 4270 - RNA, 20 nt, synthetic construct
  misc_feature 1..20: note = spacer sequence
  source 1..20: mol_type = other RNA
tcctcacatctgctccactg

SEQ ID NO: 4271 - RNA, 20 nt, synthetic construct
  misc_feature 1..20: note = spacer sequence
  source 1..20: mol_type = other RNA
tcacatctgctccactggca

SEQ ID NO: 4272 - RNA, 20 nt, synthetic construct
  misc_feature 1..20: note = spacer sequence
  source 1..20: mol_type = other RNA
catctgctccactggcagcc

SEQ ID NO: 4273 - RNA, 20 nt, synthetic construct
  misc_feature 1..20: note = spacer sequence
  source 1..20: mol_type = other RNA
gctccactggcagcctcctt

SEQ ID NO: 4274 - RNA, 20 nt, synthetic construct
  misc_feature 1..20: note = spacer sequence
  source 1..20: mol_type = other RNA
actggcagcctccttggcca

SEQ ID NO: 4275 - RNA, 20 nt, synthetic construct
  misc_feature 1..20: note = spacer sequence
  source 1..20: mol_type = other RNA
ttggccatattaattaacaa

SEQ ID NO: 4276 - RNA, 20 nt, synthetic construct
  misc_feature 1..20: note = spacer sequence
  source 1..20: mol_type = other RNA
ttctattgaaccaacacctt

SEQ ID NO: 4277 - RNA, 20 nt, synthetic construct
  misc_feature 1..20: note = spacer sequence
  source 1..20: mol_type = other RNA
attgaaccaacaccttggag

SEQ ID NO: 4278 - RNA, 20 nt, synthetic construct
  misc_feature 1..20: note = spacer sequence
  source 1..20: mol_type = other RNA
atagaaggagttgttgttaa

SEQ ID NO: 4279 - RNA, 20 nt, synthetic construct
  misc_feature 1..20: note = spacer sequence
  source 1..20: mol_type = other RNA
aaggtgttggttcaatagaa

SEQ ID NO: 4280 - RNA, 20 nt, synthetic construct
  misc_feature 1..20: note = spacer sequence
  source 1..20: mol_type = other RNA
tggactcttgtcctcttgca

SEQ ID NO: 4281 - RNA, 20 nt, synthetic construct
  misc_feature 1..20: note = spacer sequence
  source 1..20: mol_type = other RNA
aggataactccaaggtgttg

SEQ ID NO: 4282 - RNA, 20 nt, synthetic construct
  misc_feature 1..20: note = spacer sequence
  source 1..20: mol_type = other RNA
tgtcctcttgcattcaacgt

SEQ ID NO: 4283 - RNA, 20 nt, synthetic construct
  misc_feature 1..20: note = spacer sequence
  source 1..20: mol_type = other RNA
tcttgcattcaacgtcttaa

SEQ ID NO: 4284 - RNA, 20 nt, synthetic construct
  misc_feature 1..20: note = spacer sequence
  source 1..20: mol_type = other RNA
tgcattcaacgtcttaacca

SEQ ID NO: 4285 - RNA, 20 nt, synthetic construct
  misc_feature 1..20: note = spacer sequence
  source 1..20: mol_type = other RNA
acgtcttaaccattggcaaa

SEQ ID NO: 4286 - RNA, 20 nt, synthetic construct
  misc_feature 1..20: note = spacer sequence
  source 1..20: mol_type = other RNA
taaccattggcaaatcctac

SEQ ID NO: 4287 - RNA, 20 nt, synthetic construct
  misc_feature 1..20: note = spacer sequence
  source 1..20: mol_type = other RNA
tactggcatgacctttgaaa

SEQ ID NO: 4288 - RNA, 20 nt, synthetic construct
  misc_feature 1..20: note = spacer sequence
  source 1..20: mol_type = other RNA
tgccagtaggatttgccaat

SEQ ID NO: 4289 - RNA, 20 nt, synthetic construct
  misc_feature 1..20: note = spacer sequence
  source 1..20: mol_type = other RNA
aaggtcatgccagtaggatt

SEQ ID NO: 4290 - RNA, 20 nt, synthetic construct
  misc_feature 1..20: note = spacer sequence
  source 1..20: mol_type = other RNA
ctgggccccaagttgggtac

SEQ ID NO: 4291 - RNA, 20 nt, synthetic construct
  misc_feature 1..20: note = spacer sequence
  source 1..20: mol_type = other RNA
ctgccacagttccctgggcc

SEQ ID NO: 4292 - RNA, 20 nt, synthetic construct
  misc_feature 1..20: note = spacer sequence
  source 1..20: mol_type = other RNA
cccaaatccctgccacagtt

SEQ ID NO: 4293 - RNA, 20 nt, synthetic construct
  misc_feature 1..20: note = spacer sequence
  source 1..20: mol_type = other RNA
ctacctcagcatgaaaccca

SEQ ID NO: 4294 - RNA, 20 nt, synthetic construct
  misc_feature 1..20: note = spacer sequence
  source 1..20: mol_type = other RNA
acctcagcatgaaacccagc

SEQ ID NO: 4295 - RNA, 20 nt, synthetic construct
  misc_feature 1..20: note = spacer sequence
  source 1..20: mol_type = other RNA
gcatgaaacccagccctgct

SEQ ID NO: 4296 - RNA, 20 nt, synthetic construct
  misc_feature 1..20: note = spacer sequence
  source 1..20: mol_type = other RNA
tgctgaggtagagagttata

SEQ ID NO: 4297 - RNA, 20 nt, synthetic construct
  misc_feature 1..20: note = spacer sequence
  source 1..20: mol_type = other RNA
agtaccagagaaataggggg

SEQ ID NO: 4298 - RNA, 20 nt, synthetic construct
  misc_feature 1..20: note = spacer sequence
  source 1..20: mol_type = other RNA
ggtactggagcagggctggg

SEQ ID NO: 4299 - RNA, 20 nt, synthetic construct
  misc_feature 1..20: note = spacer sequence
  source 1..20: mol_type = other RNA
ctggtactggagcagggctg

SEQ ID NO: 4300 - RNA, 20 nt, synthetic construct
  misc_feature 1..20: note = spacer sequence
  source 1..20: mol_type = other RNA
ggaggtagcacccttggcat

SEQ ID NO: 4301 - RNA, 20 nt, synthetic construct
  misc_feature 1..20: note = spacer sequence
  source 1..20: mol_type = other RNA
agataccccctatttctctg

SEQ ID NO: 4302 - RNA, 20 nt, synthetic construct
  misc_feature 1..20: note = spacer sequence
  source 1..20: mol_type = other RNA
atgccaagggtgctacctcc

SEQ ID NO: 4303 - RNA, 20 nt, synthetic construct
  misc_feature 1..20: note = spacer sequence
  source 1..20: mol_type = other RNA
tcatgatggcagtggcagtg

SEQ ID NO: 4304 - RNA, 20 nt, synthetic construct
  misc_feature 1..20: note = spacer sequence
  source 1..20: mol_type = other RNA
tgatggcagtggcagtggta

SEQ ID NO: 4305 - RNA, 20 nt, synthetic construct
  misc_feature 1..20: note = spacer sequence
  source 1..20: mol_type = other RNA
tgaggacacccaattccatg

SEQ ID NO: 4306 - RNA, 20 nt, synthetic construct
  misc_feature 1..20: note = spacer sequence
  source 1..20: mol_type = other RNA
cgtggctctgtgaatgatgg

SEQ ID NO: 4307 - RNA, 20 nt, synthetic construct
  misc_feature 1..20: note = spacer sequence
  source 1..20: mol_type = other RNA
gtgaatgatggacaggaaca

SEQ ID NO: 4308 - RNA, 20 nt, synthetic construct
  misc_feature 1..20: note = spacer sequence
  source 1..20: mol_type = other RNA
cagagccacgtgaagtttta

SEQ ID NO: 4309 - RNA, 20 nt, synthetic construct
  misc_feature 1..20: note = spacer sequence
  source 1..20: mol_type = other RNA
ttcacagagccacgtgaagt

SEQ ID NO: 4310 - RNA, 20 nt, synthetic construct
  misc_feature 1..20: note = spacer sequence
  source 1..20: mol_type = other RNA
atcattcacagagccacgtg

SEQ ID NO: 4311 - RNA, 20 nt, synthetic construct
  misc_feature 1..20: note = spacer sequence
  source 1..20: mol_type = other RNA
tgtccatcattcacagagcc

SEQ ID NO: 4312 - RNA, 20 nt, synthetic construct
  misc_feature 1..20: note = spacer sequence
  source 1..20: mol_type = other RNA
tgttcctgtccatcattcac

SEQ ID NO: 4313 - RNA, 20 nt, synthetic construct
  misc_feature 1..20: note = spacer sequence
  source 1..20: mol_type = other RNA
ggtttcttgttcctgtccat

SEQ ID NO: 4314 - RNA, 20 nt, synthetic construct
  misc_feature 1..20: note = spacer sequence
  source 1..20: mol_type = other RNA
ggtctggtttcttgttcctg

SEQ ID NO: 4315 - RNA, 20 nt, synthetic construct
  misc_feature 1..20: note = spacer sequence
  source 1..20: mol_type = other RNA
tctggtctggtttcttgttc

SEQ ID NO: 4316 - RNA, 20 nt, synthetic construct
  misc_feature 1..20: note = spacer sequence
  source 1..20: mol_type = other RNA
tcttctggtctggtttcttg

SEQ ID NO: 4317 - RNA, 20 nt, synthetic construct
  misc_feature 1..20: note = spacer sequence
  source 1..20: mol_type = other RNA
tcctcttctggtctggtttc

SEQ ID NO: 4318 - RNA, 20 nt, synthetic construct
  misc_feature 1..20: note = spacer sequence
  source 1..20: mol_type = other RNA
tgttcctcctcttctggtct

SEQ ID NO: 4319 - RNA, 20 nt, synthetic construct
  misc_feature 1..20: note = spacer sequence
  source 1..20: mol_type = other RNA
gtcttgttcctcctcttctg

SEQ ID NO: 4320 - RNA, 20 nt, synthetic construct
  misc_feature 1..20: note = spacer sequence
  source 1..20: mol_type = other RNA
gcctctgtcttgttcctcct

SEQ ID NO: 4321 - RNA, 20 nt, synthetic construct
  misc_feature 1..20: note = spacer sequence
  source 1..20: mol_type = other RNA
ccacccaaatctcaccttga

SEQ ID NO: 4322 - RNA, 20 nt, synthetic construct
  misc_feature 1..20: note = spacer sequence
  source 1..20: mol_type = other RNA
caccttgaattgcgactccc

SEQ ID NO: 4323 - RNA, 20 nt, synthetic construct
  misc_feature 1..20: note = spacer sequence
  source 1..20: mol_type = other RNA
ccttgaattgcgactcccac

SEQ ID NO: 4324 - RNA, 20 nt, synthetic construct
  misc_feature 1..20: note = spacer sequence
  source 1..20: mol_type = other RNA
aggtgagatttgggtgggga

SEQ ID NO: 4325 - RNA, 20 nt, synthetic construct
  misc_feature 1..20: note = spacer sequence
  source 1..20: mol_type = other RNA
caattcaaggtgagatttgg

SEQ ID NO: 4326 - RNA, 20 nt, synthetic construct
  misc_feature 1..20: note = spacer sequence
  source 1..20: mol_type = other RNA
cacaattcccacgtatcatg

SEQ ID NO: 4327 - RNA, 20 nt, synthetic construct
  misc_feature 1..20: note = spacer sequence
  source 1..20: mol_type = other RNA
cacgtatcatgggagaaacc

SEQ ID NO: 4328 - RNA, 20 nt, synthetic construct
  misc_feature 1..20: note = spacer sequence
  source 1..20: mol_type = other RNA
tgggagaaacctggtgggag

SEQ ID NO: 4329 - RNA, 20 nt, synthetic construct
  misc_feature 1..20: note = spacer sequence
  source 1..20: mol_type = other RNA
catgatacgtgggaattgtg

SEQ ID NO: 4330 - RNA, 20 nt, synthetic construct
  misc_feature 1..20: note = spacer sequence
  source 1..20: mol_type = other RNA
cccatgatacgtgggaattg

SEQ ID NO: 4331 - RNA, 20 nt, synthetic construct
  misc_feature 1..20: note = spacer sequence
  source 1..20: mol_type = other RNA
caccaggtttctcccatgat

SEQ ID NO: 4332 - RNA, 20 nt, synthetic construct
  misc_feature 1..20: note = spacer sequence
  source 1..20: mol_type = other RNA
ttcccatgttgttcttgtga

SEQ ID NO: 4333 - RNA, 20 nt, synthetic construct
  misc_feature 1..20: note = spacer sequence
  source 1..20: mol_type = other RNA
catgttgttcttgtgatcct

SEQ ID NO: 4334 - RNA, 20 nt, synthetic construct
  misc_feature 1..20: note = spacer sequence
  source 1..20: mol_type = other RNA
tgtgatcctgaataagtctc

SEQ ID NO: 4335 - RNA, 20 nt, synthetic construct
  misc_feature 1..20: note = spacer sequence
  source 1..20: mol_type = other RNA
caagaacaacatgggaaaga

SEQ ID NO: 4336 - RNA, 20 nt, synthetic construct
  misc_feature 1..20: note = spacer sequence
  source 1..20: mol_type = other RNA
tgaataagtctcatgagatc

SEQ ID NO: 4337 - RNA, 20 nt, synthetic construct
  misc_feature 1..20: note = spacer sequence
  source 1..20: mol_type = other RNA
ggatcacaagaacaacatgg

SEQ ID NO: 4338 - RNA, 20 nt, synthetic construct
  misc_feature 1..20: note = spacer sequence
  source 1..20: mol_type = other RNA
catgagatctggtggtttta

SEQ ID NO: 4339 - RNA, 20 nt, synthetic construct
  misc_feature 1..20: note = spacer sequence
  source 1..20: mol_type = other RNA
tgagatctggtggttttaaa

SEQ ID NO: 4340 - RNA, 20 nt, synthetic construct
  misc_feature 1..20: note = spacer sequence
  source 1..20: mol_type = other RNA
tgagacttattcaggatcac

SEQ ID NO: 4341 - RNA, 20 nt, synthetic construct
  misc_feature 1..20: note = spacer sequence
  source 1..20: mol_type = other RNA
catgagacttattcaggatc

SEQ ID NO: 4342 - RNA, 20 nt, synthetic construct
  misc_feature 1..20: note = spacer sequence
  source 1..20: mol_type = other RNA
ggtggttttaaaaatgggag

SEQ ID NO: 4343 - RNA, 20 nt, synthetic construct
  misc_feature 1..20: note = spacer sequence
  source 1..20: mol_type = other RNA
catttttaaaaccaccagat

SEQ ID NO: 4344 - RNA, 20 nt, synthetic construct
  misc_feature 1..20: note = spacer sequence
  source 1..20: mol_type = other RNA
agctgggcacagtggctcat

SEQ ID NO: 4345 - RNA, 20 nt, synthetic construct
  misc_feature 1..20: note = spacer sequence
  source 1..20: mol_type = other RNA
tgcctgtaatcctagcactt

SEQ ID NO: 4346 - RNA, 20 nt, synthetic construct
  misc_feature 1..20: note = spacer sequence
  source 1..20: mol_type = other RNA
tagcactttgggaggccgag

SEQ ID NO: 4347 - RNA, 20 nt, synthetic construct
  misc_feature 1..20: note = spacer sequence
  source 1..20: mol_type = other RNA
caaagtgctaggattacagg

SEQ ID NO: 4348 - RNA, 20 nt, synthetic construct
  misc_feature 1..20: note = spacer sequence
  source 1..20: mol_type = other RNA
gcctcccaaagtgctaggat

SEQ ID NO: 4349 - RNA, 20 nt, synthetic construct
  misc_feature 1..20: note = spacer sequence
  source 1..20: mol_type = other RNA
acccacctcggcctcccaaa

SEQ ID NO: 4350 - RNA, 20 nt, synthetic construct
  misc_feature 1..20: note = spacer sequence
  source 1..20: mol_type = other RNA
cctgaggtcaggcgtttgag

SEQ ID NO: 4351 - RNA, 20 nt, synthetic construct
  misc_feature 1..20: note = spacer sequence
  source 1..20: mol_type = other RNA
ggtgatccacccacctcggc

SEQ ID NO: 4352 - RNA, 20 nt, synthetic construct
  misc_feature 1..20: note = spacer sequence
  source 1..20: mol_type = other RNA
ggcgtttgagaccagcctgg

SEQ ID NO: 4353 - RNA, 20 nt, synthetic construct
  misc_feature 1..20: note = spacer sequence
  source 1..20: mol_type = other RNA
aacgcctgacctcaggtgat

SEQ ID NO: 4354 - RNA, 20 nt, synthetic construct
  misc_feature 1..20: note = spacer sequence
  source 1..20: mol_type = other RNA
caaacgcctgacctcaggtg

SEQ ID NO: 4355 - RNA, 20 nt, synthetic construct
  misc_feature 1..20: note = spacer sequence
  source 1..20: mol_type = other RNA
ctagtgaagaaacaaaaaaa

SEQ ID NO: 4356 - RNA, 20 nt, synthetic construct
  misc_feature 1..20: note = spacer sequence
  source 1..20: mol_type = other RNA
agtgaagaaacaaaaaaatt

SEQ ID NO: 4357 - RNA, 20 nt, synthetic construct
  misc_feature 1..20: note = spacer sequence
  source 1..20: mol_type = other RNA
ctagagacggggttttgcca

SEQ ID NO: 4358 - RNA, 20 nt, synthetic construct
  misc_feature 1..20: note = spacer sequence
  source 1..20: mol_type = other RNA
tcactagagacggggttttg

SEQ ID NO: 4359 - RNA, 20 nt, synthetic construct
  misc_feature 1..20: note = spacer sequence
  source 1..20: mol_type = other RNA
ctgtagtcccaactacctgg

SEQ ID NO: 4360 - RNA, 20 nt, synthetic construct
  misc_feature 1..20: note = spacer sequence
  source 1..20: mol_type = other RNA
caactacctgggaggctgag

SEQ ID NO: 4361 - RNA, 20 nt, synthetic construct
  misc_feature 1..20: note = spacer sequence
  source 1..20: mol_type = other RNA
caggtagttgggactacagg

SEQ ID NO: 4362 - RNA, 20 nt, synthetic construct
  misc_feature 1..20: note = spacer sequence
  source 1..20: mol_type = other RNA
gcctcccaggtagttgggac

SEQ ID NO: 4363 - RNA, 20 nt, synthetic construct
  misc_feature 1..20: note = spacer sequence
  source 1..20: mol_type = other RNA
tgcctcagcctcccaggtag

SEQ ID NO: 4364 - RNA, 20 nt, synthetic construct
  misc_feature 1..20: note = spacer sequence
  source 1..20: mol_type = other RNA
cttgaatccgggaggtggag

SEQ ID NO: 4365 - RNA, 20 nt, synthetic construct
  misc_feature 1..20: note = spacer sequence
  source 1..20: mol_type = other RNA
agggattttcctgcctcagc

SEQ ID NO: 4366 - RNA, 20 nt, synthetic construct
  misc_feature 1..20: note = spacer sequence
  source 1..20: mol_type = other RNA
gggaggtggaggctgcagtg

SEQ ID NO: 4367 - RNA, 20 nt, synthetic construct
  misc_feature 1..20: note = spacer sequence
  source 1..20: mol_type = other RNA
cggattcaagggattttcct

SEQ ID NO: 4368 - RNA, 20 nt, synthetic construct
  misc_feature 1..20: note = spacer sequence
  source 1..20: mol_type = other RNA
acctcccggattcaagggat

SEQ ID NO: 4369 - RNA, 20 nt, synthetic construct
  misc_feature 1..20: note = spacer sequence
  source 1..20: mol_type = other RNA
ctgcagcctccacctcccgg

SEQ ID NO: 4370 - RNA, 20 nt, synthetic construct
  misc_feature 1..20: note = spacer sequence
  source 1..20: mol_type = other RNA
tggctcactgcagcctccac

SEQ ID NO: 4371 - RNA, 20 nt, synthetic construct
  misc_feature 1..20: note = spacer sequence
  source 1..20: mol_type = other RNA
caccattgcactccagcctg

SEQ ID NO: 4372 - RNA, 20 nt, synthetic construct
  misc_feature 1..20: note = spacer sequence
  source 1..20: mol_type = other RNA
agcctgggcaacaagagtga

SEQ ID NO: 4373 - RNA, 20 nt, synthetic construct
  misc_feature 1..20: note = spacer sequence
  source 1..20: mol_type = other RNA
tgttgcccaggctggagtgc

SEQ ID NO: 4374 - RNA, 20 nt, synthetic construct
  misc_feature 1..20: note = spacer sequence
  source 1..20: mol_type = other RNA
ctcttgttgcccaggctgga

SEQ ID NO: 4375 - RNA, 20 nt, synthetic construct
  misc_feature 1..20: note = spacer sequence
  source 1..20: mol_type = other RNA
atctcaaaaaaaaaaaaaaa

SEQ ID NO: 4376 - RNA, 20 nt, synthetic construct
  misc_feature 1..20: note = spacer sequence
  source 1..20: mol_type = other RNA
caaaaaaaaaaaaaaaaaaa

SEQ ID NO: 4377 - RNA, 20 nt, synthetic construct
  misc_feature 1..20: note = spacer sequence
  source 1..20: mol_type = other RNA
aaaaaaaaaaaaaaaaaaaa

SEQ ID NO: 4378 - RNA, 20 nt, synthetic construct
  misc_feature 1..20: note = spacer sequence
  source 1..20: mol_type = other RNA
cacttctaatcccagcactt

SEQ ID NO: 4379 - RNA, 20 nt, synthetic construct
  misc_feature 1..20: note = spacer sequence
  source 1..20: mol_type = other RNA
aatcccagcactttgggagg

SEQ ID NO: 4380 - RNA, 20 nt, synthetic construct
  misc_feature 1..20: note = spacer sequence
  source 1..20: mol_type = other RNA
cagcactttgggaggctgag

SEQ ID NO: 4381 - RNA, 20 nt, synthetic construct
  misc_feature 1..20: note = spacer sequence
  source 1..20: mol_type = other RNA
caaagtgctgggattagaag

SEQ ID NO: 4382 - RNA, 20 nt, synthetic construct
  misc_feature 1..20: note = spacer sequence
  source 1..20: mol_type = other RNA
gcctcccaaagtgctgggat

SEQ ID NO: 4383 - RNA, 20 nt, synthetic construct
  misc_feature 1..20: note = spacer sequence
  source 1..20: mol_type = other RNA
acccacctcagcctcccaaa

SEQ ID NO: 4384 - RNA, 20 nt, synthetic construct
  misc_feature 1..20: note = spacer sequence
  source 1..20: mol_type = other RNA
cgaggtcaggagattgagac

SEQ ID NO: 4385 - RNA, 20 nt, synthetic construct
  misc_feature 1..20: note = spacer sequence
  source 1..20: mol_type = other RNA
tgatccacccacctcagcct

SEQ ID NO: 4386 - RNA, 20 nt, synthetic construct
  misc_feature 1..20: note = spacer sequence
  source 1..20: mol_type = other RNA
ggagattgagaccatcctgg

SEQ ID NO: 4387 - RNA, 20 nt, synthetic construct
  misc_feature 1..20: note = spacer sequence
  source 1..20: mol_type = other RNA
tgacctcgtgatccacccac

SEQ ID NO: 4388 - RNA, 20 nt, synthetic construct
  misc_feature 1..20: note = spacer sequence
  source 1..20: mol_type = other RNA
cctgacctcgtgatccaccc

SEQ ID NO: 4389 - RNA, 20 nt, synthetic construct
  misc_feature 1..20: note = spacer sequence
  source 1..20: mol_type = other RNA
atctcctgacctcgtgatcc

SEQ ID NO: 4390 - RNA, 20 nt, synthetic construct
  misc_feature 1..20: note = spacer sequence
  source 1..20: mol_type = other RNA
caatctcctgacctcgtgat

SEQ ID NO: 4391 - RNA, 20 nt, synthetic construct
  misc_feature 1..20: note = spacer sequence
  source 1..20: mol_type = other RNA
tggctaacacggtgaaaccc

SEQ ID NO: 4392 - RNA, 20 nt, synthetic construct
  misc_feature 1..20: note = spacer sequence
  source 1..20: mol_type = other RNA
ccgtgttagccaggatggtc

SEQ ID NO: 4393 - RNA, 20 nt, synthetic construct
  misc_feature 1..20: note = spacer sequence
  source 1..20: mol_type = other RNA
ctactaaaaatacaaaaaat

SEQ ID NO: 4394 - RNA, 20 nt, synthetic construct
  misc_feature 1..20: note = spacer sequence
  source 1..20: mol_type = other RNA
actaaaaatacaaaaaatta

SEQ ID NO: 4395 - RNA, 20 nt, synthetic construct
  misc_feature 1..20: note = spacer sequence
  source 1..20: mol_type = other RNA
cgccaccacgcccagctaat

SEQ ID NO: 4396 - RNA, 20 nt, synthetic construct
  misc_feature 1..20: note = spacer sequence
  source 1..20: mol_type = other RNA
cagctactcgggaggctaag

SEQ ID NO: 4397 - RNA, 20 nt, synthetic construct
  misc_feature 1..20: note = spacer sequence
  source 1..20: mol_type = other RNA
gctactcgggaggctaaggc

SEQ ID NO: 4398 - RNA, 20 nt, synthetic construct
  misc_feature 1..20: note = spacer sequence
  source 1..20: mol_type = other RNA
ggaggctaaggcaggagaat

SEQ ID NO: 4399 - RNA, 20 nt, synthetic construct
  misc_feature 1..20: note = spacer sequence
  source 1..20: mol_type = other RNA
cgagtagctgagactactgg

SEQ ID NO: 4400 - RNA, 20 nt, synthetic construct
  misc_feature 1..20: note = spacer sequence
  source 1..20: mol_type = other RNA
tgccttagcctcccgagtag

SEQ ID NO: 4401 - RNA, 20 nt, synthetic construct
  misc_feature 1..20: note = spacer sequence
  source 1..20: mol_type = other RNA
cctgccttagcctcccgagt

SEQ ID NO: 4402 - RNA, 20 nt, synthetic construct
  misc_feature 1..20: note = spacer sequence
  source 1..20: mol_type = other RNA
aacccattctcctgccttag

SEQ ID NO: 4403 - RNA, 20 nt, synthetic construct
  misc_feature 1..20: note = spacer sequence
  source 1..20: mol_type = other RNA
tggaggtggagcttgcagtg

SEQ ID NO: 4404 - RNA, 20 nt, synthetic construct
  misc_feature 1..20: note = spacer sequence
  source 1..20: mol_type = other RNA
aggattcaaacccattctcc

SEQ ID NO: 4405 - RNA, 20 nt, synthetic construct
  misc_feature 1..20: note = spacer sequence
  source 1..20: mol_type = other RNA
acctccaggattcaaaccca

SEQ ID NO: 4406 - RNA, 20 nt, synthetic construct
  misc_feature 1..20: note = spacer sequence
  source 1..20: mol_type = other RNA
ctgcaagctccacctccagg

SEQ ID NO: 4407 - RNA, 20 nt, synthetic construct
  misc_feature 1..20: note = spacer sequence
  source 1..20: mol_type = other RNA
gctcactgcaagctccacct

SEQ ID NO: 4408 - RNA, 20 nt, synthetic construct
  misc_feature 1..20: note = spacer sequence
  source 1..20: mol_type = other RNA
cggctcactgcaagctccac

SEQ ID NO: 4409 - RNA, 20 nt, synthetic construct
  misc_feature 1..20: note = spacer sequence
  source 1..20: mol_type = other RNA
agcctgggcgacagagtgag

SEQ ID NO: 4410 - RNA, 20 nt, synthetic construct
  misc_feature 1..20: note = spacer sequence
  source 1..20: mol_type = other RNA
cccaggctggagtgcagtgg

SEQ ID NO: 4411 - RNA, 20 nt, synthetic construct
  misc_feature 1..20: note = spacer sequence
  source 1..20: mol_type = other RNA
gtcgcccaggctggagtgca

SEQ ID NO: 4412 - RNA, 20 nt, synthetic construct
  misc_feature 1..20: note = spacer sequence
  source 1..20: mol_type = other RNA
ctctgtcgcccaggctggag

SEQ ID NO: 4413 - RNA, 20 nt, synthetic construct
  misc_feature 1..20: note = spacer sequence
  source 1..20: mol_type = other RNA
cactctgtcgcccaggctgg

SEQ ID NO: 4414 - RNA, 20 nt, synthetic construct
  misc_feature 1..20: note = spacer sequence
  source 1..20: mol_type = other RNA
atctcaaaaaaaaaaaaaaa

SEQ ID NO: 4415 - RNA, 20 nt, synthetic construct
  misc_feature 1..20: note = spacer sequence
  source 1..20: mol_type = other RNA
caaaaaaaaaaaaaaaaaaa

SEQ ID NO: 4416 - RNA, 20 nt, synthetic construct
  misc_feature 1..20: note = spacer sequence
  source 1..20: mol_type = other RNA
aaaaaaaaaaaaaaaaaaga

SEQ ID NO: 4417 - RNA, 20 nt, synthetic construct
  misc_feature 1..20: note = spacer sequence
  source 1..20: mol_type = other RNA
ttttttttttttttttttga

SEQ ID NO: 4418 - RNA, 20 nt, synthetic construct
  misc_feature 1..20: note = spacer sequence
  source 1..20: mol_type = other RNA
ggtatttctttttttttttt

SEQ ID NO: 4419 - RNA, 20 nt, synthetic construct
  misc_feature 1..20: note = spacer sequence
  source 1..20: mol_type = other RNA
caggtatttctttttttttt

SEQ ID NO: 4420 - RNA, 20 nt, synthetic construct
  misc_feature 1..20: note = spacer sequence
  source 1..20: mol_type = other RNA
cagtctcaggtatttctttt

SEQ ID NO: 4421 - RNA, 20 nt, synthetic construct
  misc_feature 1..20: note = spacer sequence
  source 1..20: mol_type = other RNA
ttataaatttcccagtctca

SEQ ID NO: 4422 - RNA, 20 nt, synthetic construct
  misc_feature 1..20: note = spacer sequence
  source 1..20: mol_type = other RNA
tttctttataaatttcccag

SEQ ID NO: 4423 - RNA, 20 nt, synthetic construct
  misc_feature 1..20: note = spacer sequence
  source 1..20: mol_type = other RNA
cggttctgcaggctgtacaa

SEQ ID NO: 4424 - RNA, 20 nt, synthetic construct
  misc_feature 1..20: note = spacer sequence
  source 1..20: mol_type = other RNA
gcaggctgtacaagcatggc

SEQ ID NO: 4425 - RNA, 20 nt, synthetic construct
  misc_feature 1..20: note = spacer sequence
  source 1..20: mol_type = other RNA
ctcagcttcatggggggggc

SEQ ID NO: 4426 - RNA, 20 nt, synthetic construct
  misc_feature 1..20: note = spacer sequence
  source 1..20: mol_type = other RNA
gcttcatggggggggcctca

SEQ ID NO: 4427 - RNA, 20 nt, synthetic construct
  misc_feature 1..20: note = spacer sequence
  source 1..20: mol_type = other RNA
tggggggggcctcagggagc

SEQ ID NO: 4428 - RNA, 20 nt, synthetic construct
  misc_feature 1..20: note = spacer sequence
  source 1..20: mol_type = other RNA
gggagcttttattcatggca

SEQ ID NO: 4429 - RNA, 20 nt, synthetic construct
  misc_feature 1..20: note = spacer sequence
  source 1..20: mol_type = other RNA
ctgaggccccccccatgaag

SEQ ID NO: 4430 - RNA, 20 nt, synthetic construct
  misc_feature 1..20: note = spacer sequence
  source 1..20: mol_type = other RNA
tggcagaaggcaatgtggga

SEQ ID NO: 4431 - RNA, 20 nt, synthetic construct
  misc_feature 1..20: note = spacer sequence
  source 1..20: mol_type = other RNA
gccatgaataaaagctccct

SEQ ID NO: 4432 - RNA, 20 nt, synthetic construct
  misc_feature 1..20: note = spacer sequence
  source 1..20: mol_type = other RNA
cacattgccttctgccatga

SEQ ID NO: 4433 - RNA, 20 nt, synthetic construct
  misc_feature 1..20: note = spacer sequence
  source 1..20: mol_type = other RNA
catggtgaaagcaggagcaa

SEQ ID NO: 4434 - RNA, 20 nt, synthetic construct
  misc_feature 1..20: note = spacer sequence
  source 1..20: mol_type = other RNA
ccatgtgaaatgcctgctcc

SEQ ID NO: 4435 - RNA, 20 nt, synthetic construct
  misc_feature 1..20: note = spacer sequence
  source 1..20: mol_type = other RNA
tgctttcaccatgtgaaatg

SEQ ID NO: 4436 - RNA, 20 nt, synthetic construct
  misc_feature 1..20: note = spacer sequence
  source 1..20: mol_type = other RNA
tgctcctgctttcaccatgt

SEQ ID NO: 4437 - RNA, 20 nt, synthetic construct
  misc_feature 1..20: note = spacer sequence
  source 1..20: mol_type = other RNA
cttgctcctgctttcaccat

SEQ ID NO: 4438 - RNA, 20 nt, synthetic construct
  misc_feature 1..20: note = spacer sequence
  source 1..20: mol_type = other RNA
ctcttgctcctgctttcacc

SEQ ID NO: 4439 - RNA, 20 nt, synthetic construct
  misc_feature 1..20: note = spacer sequence
  source 1..20: mol_type = other RNA
ctctcttgctcctgctttca

SEQ ID NO: 4440 - RNA, 20 nt, synthetic construct
  misc_feature 1..20: note = spacer sequence
  source 1..20: mol_type = other RNA
cccactctctctcttgctcc

SEQ ID NO: 4441 - RNA, 20 nt, synthetic construct
  misc_feature 1..20: note = spacer sequence
  source 1..20: mol_type = other RNA
tcccccactctctctcttgc

SEQ ID NO: 4442 - RNA, 20 nt, synthetic construct
  misc_feature 1..20: note = spacer sequence
  source 1..20: mol_type = other RNA
tttttgggctatgcaaattc

SEQ ID NO: 4443 - RNA, 20 nt, synthetic construct
  misc_feature 1..20: note = spacer sequence
  source 1..20: mol_type = other RNA
ccagttgcaccccgggtcta

SEQ ID NO: 4444 - RNA, 20 nt, synthetic construct
  misc_feature 1..20: note = spacer sequence
  source 1..20: mol_type = other RNA
agttgcaccccgggtctaat

SEQ ID NO: 4445 - RNA, 20 nt, synthetic construct
  misc_feature 1..20: note = spacer sequence
  source 1..20: mol_type = other RNA
aatgaatcagaaacactggg

SEQ ID NO: 4446 - RNA, 20 nt, synthetic construct
  misc_feature 1..20: note = spacer sequence
  source 1..20: mol_type = other RNA
ttagacccggggtgcaactg

SEQ ID NO: 4447 - RNA, 20 nt, synthetic construct
  misc_feature 1..20: note = spacer sequence
  source 1..20: mol_type = other RNA
gaaacactgggggtggaagc

SEQ ID NO: 4448 - RNA, 20 nt, synthetic construct
  misc_feature 1..20: note = spacer sequence
  source 1..20: mol_type = other RNA
gattcattagacccggggtg

SEQ ID NO: 4449 - RNA, 20 nt, synthetic construct
  misc_feature 1..20: note = spacer sequence
  source 1..20: mol_type = other RNA
acccccagtgtttctgattc

SEQ ID NO: 4450 - RNA, 20 nt, synthetic construct
  misc_feature 1..20: note = spacer sequence
  source 1..20: mol_type = other RNA
agctacagccatgtgaaaag

SEQ ID NO: 4451 - RNA, 20 nt, synthetic construct
  misc_feature 1..20: note = spacer sequence
  source 1..20: mol_type = other RNA
catggctgtagctggaaata

SEQ ID NO: 4452 - RNA, 20 nt, synthetic construct
  misc_feature 1..20: note = spacer sequence
  source 1..20: mol_type = other RNA
gcaaatcctctccccagaaa

SEQ ID NO: 4453 - RNA, 20 nt, synthetic construct
  misc_feature 1..20: note = spacer sequence
  source 1..20: mol_type = other RNA
tctccccagaaagcaactat

SEQ ID NO: 4454 - RNA, 20 nt, synthetic construct
  misc_feature 1..20: note = spacer sequence
  source 1..20: mol_type = other RNA
ccccagaaagcaactataag

SEQ ID NO: 4455 - RNA, 20 nt, synthetic construct
  misc_feature 1..20: note = spacer sequence
  source 1..20: mol_type = other RNA
ccagaaagcaactataagtc

SEQ ID NO: 4456 - RNA, 20 nt, synthetic construct
  misc_feature 1..20: note = spacer sequence
  source 1..20: mol_type = other RNA
ggggagaggatttgctgact

SEQ ID NO: 4457 - RNA, 20 nt, synthetic construct
  misc_feature 1..20: note = spacer sequence
  source 1..20: mol_type = other RNA
gaacaaaattgacaagaaca

SEQ ID NO: 4458 - RNA, 20 nt, synthetic construct
  misc_feature 1..20: note = spacer sequence
  source 1..20: mol_type = other RNA
gacttatagttgctttctgg

SEQ ID NO: 4459 - RNA, 20 nt, synthetic construct
  misc_feature 1..20: note = spacer sequence
  source 1..20: mol_type = other RNA
attttgttcagacttatagt

SEQ ID NO: 4460 - RNA, 20 nt, synthetic construct
  misc_feature 1..20: note = spacer sequence
  source 1..20: mol_type = other RNA
tgtcaattttgttcagactt

SEQ ID NO: 4461 - RNA, 20 nt, synthetic construct
  misc_feature 1..20: note = spacer sequence
  source 1..20: mol_type = other RNA
ggaaatcaataaaactcata

SEQ ID NO: 4462 - RNA, 20 nt, synthetic construct
  misc_feature 1..20: note = spacer sequence
  source 1..20: mol_type = other RNA
agagcaccaaaatagttgtt

SEQ ID NO: 4463 - RNA, 20 nt, synthetic construct
  misc_feature 1..20: note = spacer sequence
  source 1..20: mol_type = other RNA
ataaaactcatacaacaatc

SEQ ID NO: 4464 - RNA, 20 nt, synthetic construct
  misc_feature 1..20: note = spacer sequence
  source 1..20: mol_type = other RNA
tacaacaatctgagaagtgt

SEQ ID NO: 4465 - RNA, 20 nt, synthetic construct
  misc_feature 1..20: note = spacer sequence
  source 1..20: mol_type = other RNA
gagaagtgtttaagcttgat

SEQ ID NO: 4466 - RNA, 20 nt, synthetic construct
  misc_feature 1..20: note = spacer sequence
  source 1..20: mol_type = other RNA
gattgttgtatgagttttat

SEQ ID NO: 4467 - RNA, 20 nt, synthetic construct
  misc_feature 1..20: note = spacer sequence
  source 1..20: mol_type = other RNA
cagattgttgtatgagtttt

SEQ ID NO: 4468 - RNA, 20 nt, synthetic construct
  misc_feature 1..20: note = spacer sequence
  source 1..20: mol_type = other RNA
agcttaaacacttctcagat

SEQ ID NO: 4469 - RNA, 20 nt, synthetic construct
  misc_feature 1..20: note = spacer sequence
  source 1..20: mol_type = other RNA
gcatgttatcaagcttaaac

SEQ ID NO: 4470 - RNA, 20 nt, synthetic construct
  misc_feature 1..20: note = spacer sequence
  source 1..20: mol_type = other RNA
tacccaacgttcagcatgtt

SEQ ID NO: 4471 - RNA, 20 nt, synthetic construct
  misc_feature 1..20: note = spacer sequence
  source 1..20: mol_type = other RNA
actgttcttacccaacgttc

SEQ ID NO: 4472 - RNA, 20 nt, synthetic construct
  misc_feature 1..20: note = spacer sequence
  source 1..20: mol_type = other RNA
gaagcgttctttcctaggac

SEQ ID NO: 4473 - RNA, 20 nt, synthetic construct
  misc_feature 1..20: note = spacer sequence
  source 1..20: mol_type = other RNA
gacatccactgttcttaccc

SEQ ID NO: 4474 - RNA, 20 nt, synthetic construct
  misc_feature 1..20: note = spacer sequence
  source 1..20: mol_type = other RNA
ttcctaggactgctcccatc

SEQ ID NO: 4475 - RNA, 20 nt, synthetic construct
  misc_feature 1..20: note = spacer sequence
  source 1..20: mol_type = other RNA
taggactgctcccatctcct

SEQ ID NO: 4476 - RNA, 20 nt, synthetic construct
  misc_feature 1..20: note = spacer sequence
  source 1..20: mol_type = other RNA
taggaaagaacgcttcagac

SEQ ID NO: 4477 - RNA, 20 nt, synthetic construct
  misc_feature 1..20: note = spacer sequence
  source 1..20: mol_type = other RNA
catctcctctagccgagtgg

SEQ ID NO: 4478 - RNA, 20 nt, synthetic construct
  misc_feature 1..20: note = spacer sequence
  source 1..20: mol_type = other RNA
cctctagccgagtgggtgtg

SEQ ID NO: 4479 - RNA, 20 nt, synthetic construct
  misc_feature 1..20: note = spacer sequence
  source 1..20: mol_type = other RNA
tctagccgagtgggtgtgga

SEQ ID NO: 4480 - RNA, 20 nt, synthetic construct
  misc_feature 1..20: note = spacer sequence
  source 1..20: mol_type = other RNA
agccgagtgggtgtggaggt

SEQ ID NO: 4481 - RNA, 20 nt, synthetic construct
  misc_feature 1..20: note = spacer sequence
  source 1..20: mol_type = other RNA
gctagaggagatgggagcag

SEQ ID NO: 4482 - RNA, 20 nt, synthetic construct
  misc_feature 1..20: note = spacer sequence
  source 1..20: mol_type = other RNA
acacccactcggctagagga

SEQ ID NO: 4483 - RNA, 20 nt, synthetic construct
  misc_feature 1..20: note = spacer sequence
  source 1..20: mol_type = other RNA
gccagggcaggaccaggcat

SEQ ID NO: 4484 - RNA, 20 nt, synthetic construct
  misc_feature 1..20: note = spacer sequence
  source 1..20: mol_type = other RNA
tgccctggcagaacctccac

SEQ ID NO: 4485 - RNA, 20 nt, synthetic construct
  misc_feature 1..20: note = spacer sequence
  source 1..20: mol_type = other RNA
tgcctggtcctgccctggca

SEQ ID NO: 4486 - RNA, 20 nt, synthetic construct
  misc_feature 1..20: note = spacer sequence
  source 1..20: mol_type = other RNA
tcatgcctggtcctgccctg

SEQ ID NO: 4487 - RNA, 20 nt, synthetic construct
  misc_feature 1..20: note = spacer sequence
  source 1..20: mol_type = other RNA
aacctggcagcaccactgca

SEQ ID NO: 4488 - RNA, 20 nt, synthetic construct
  misc_feature 1..20: note = spacer sequence
  source 1..20: mol_type = other RNA
agtaagccccctccaacctg

SEQ ID NO: 4489 - RNA, 20 nt, synthetic construct
  misc_feature 1..20: note = spacer sequence
  source 1..20: mol_type = other RNA
cctgctacagcaaatccagt

SEQ ID NO: 4490 - RNA, 20 nt, synthetic construct
  misc_feature 1..20: note = spacer sequence
  source 1..20: mol_type = other RNA
gtggaagtgacaacagtttt

SEQ ID NO: 4491 - RNA, 20 nt, synthetic construct
  misc_feature 1..20: note = spacer sequence
  source 1..20: mol_type = other RNA
actgacagtgccataggtgt

SEQ ID NO: 4492 - RNA, 20 nt, synthetic construct
  misc_feature 1..20: note = spacer sequence
  source 1..20: mol_type = other RNA
cttccactgacagtgccata

SEQ ID NO: 4493 - RNA, 20 nt, synthetic construct
  misc_feature 1..20: note = spacer sequence
  source 1..20: mol_type = other RNA
agaaacgccataggaagtcc

SEQ ID NO: 4494 - RNA, 20 nt, synthetic construct
  misc_feature 1..20: note = spacer sequence
  source 1..20: mol_type = other RNA
tgaaaggcaaaactgttgtc

SEQ ID NO: 4495 - RNA, 20 nt, synthetic construct
  misc_feature 1..20: note = spacer sequence
  source 1..20: mol_type = other RNA
tatggcgtttcttgaaaggc

SEQ ID NO: 4496 - RNA, 20 nt, synthetic construct
  misc_feature 1..20: note = spacer sequence
  source 1..20: mol_type = other RNA
tttagagtgaaagaaagcaa

SEQ ID NO: 4497 - RNA, 20 nt, synthetic construct
  misc_feature 1..20: note = spacer sequence
  source 1..20: mol_type = other RNA
aaaggacttcctatggcgtt

SEQ ID NO: 4498 - RNA, 20 nt, synthetic construct
  misc_feature 1..20: note = spacer sequence
  source 1..20: mol_type = other RNA
ctctaaaggacttcctatgg

SEQ ID NO: 4499 - RNA, 20 nt, synthetic construct
  misc_feature 1..20: note = spacer sequence
  source 1..20: mol_type = other RNA
ttcactctaaaggacttcct

SEQ ID NO: 4500 - RNA, 20 nt, synthetic construct
  misc_feature 1..20: note = spacer sequence
  source 1..20: mol_type = other RNA
gagagcaactttaatgcaca

SEQ ID NO: 4501 - RNA, 20 nt, synthetic construct
  misc_feature 1..20: note = spacer sequence
  source 1..20: mol_type = other RNA
gatgttgctttctttcactc

SEQ ID NO: 4502 - RNA, 20 nt, synthetic construct
  misc_feature 1..20: note = spacer sequence
  source 1..20: mol_type = other RNA
ctgatgttgctttctttcac

SEQ ID NO: 4503 - RNA, 20 nt, synthetic construct
  misc_feature 1..20: note = spacer sequence
  source 1..20: mol_type = other RNA
tgtgcattaaagttgctctc

SEQ ID NO: 4504 - RNA, 20 nt, synthetic construct
  misc_feature 1..20: note = spacer sequence
  source 1..20: mol_type = other RNA
cacctgtaatcccagcactt

SEQ ID NO: 4505 - RNA, 20 nt, synthetic construct
  misc_feature 1..20: note = spacer sequence
  source 1..20: mol_type = other RNA
cagcactttgggaggccgag

SEQ ID NO: 4506 - RNA, 20 nt, synthetic construct
  misc_feature 1..20: note = spacer sequence
  source 1..20: mol_type = other RNA
caaagtgctgggattacagg

SEQ ID NO: 4507 - RNA, 20 nt, synthetic construct
  misc_feature 1..20: note = spacer sequence
  source 1..20: mol_type = other RNA
gcctcccaaagtgctgggat

SEQ ID NO: 4508 - RNA, 20 nt, synthetic construct
  misc_feature 1..20: note = spacer sequence
  source 1..20: mol_type = other RNA
gtggatcatgaggtcaagag

SEQ ID NO: 4509 - RNA, 20 nt, synthetic construct
  misc_feature 1..20: note = spacer sequence
  source 1..20: mol_type = other RNA
accgacctcggcctcccaaa

SEQ ID NO: 4510 - RNA, 20 nt, synthetic construct
  misc_feature 1..20: note = spacer sequence
  source 1..20: mol_type = other RNA
tgaggtcaagagatcgagac

SEQ ID NO: 4511 - RNA, 20 nt, synthetic construct
  misc_feature 1..20: note = spacer sequence
  source 1..20: mol_type = other RNA
tgatccaccgacctcggcct

SEQ ID NO: 4512 - RNA, 20 nt, synthetic construct
  misc_feature 1..20: note = spacer sequence
  source 1..20: mol_type = other RNA
agagatcgagactatcctgg

SEQ ID NO: 4513 - RNA, 20 nt, synthetic construct
  misc_feature 1..20: note = spacer sequence
  source 1..20: mol_type = other RNA
tgacctcatgatccaccgac

SEQ ID NO: 4514 - RNA, 20 nt, synthetic construct
  misc_feature 1..20: note = spacer sequence
  source 1..20: mol_type = other RNA
cttgacctcatgatccaccg

SEQ ID NO: 4515 - RNA, 20 nt, synthetic construct
  misc_feature 1..20: note = spacer sequence
  source 1..20: mol_type = other RNA
agactatcctggccaacatg

SEQ ID NO: 4516 - RNA, 20 nt, synthetic construct
  misc_feature 1..20: note = spacer sequence
  source 1..20: mol_type = other RNA
atctcttgacctcatgatcc

SEQ ID NO: 4517 - RNA, 20 nt, synthetic construct
  misc_feature 1..20: note = spacer sequence
  source 1..20: mol_type = other RNA
cgatctcttgacctcatgat

SEQ ID NO: 4518 - RNA, 20 nt, synthetic construct
  misc_feature 1..20: note = spacer sequence
  source 1..20: mol_type = other RNA
tggccaacatggtgaaatcc

SEQ ID NO: 4519 - RNA, 20 nt, synthetic construct
  misc_feature 1..20: note = spacer sequence
  source 1..20: mol_type = other RNA
ccatgttggccaggatagtc

SEQ ID NO: 4520 - RNA, 20 nt, synthetic construct
  misc_feature 1..20: note = spacer sequence
  source 1..20: mol_type = other RNA
catctctctaaaaatacaaa

SEQ ID NO: 4521 - RNA, 20 nt, synthetic construct
  misc_feature 1..20: note = spacer sequence
  source 1..20: mol_type = other RNA
ctctaaaaatacaaaaatta

SEQ ID NO: 4522 - RNA, 20 nt, synthetic construct
  misc_feature 1..20: note = spacer sequence
  source 1..20: mol_type = other RNA
ctaaaaatacaaaaattagc

SEQ ID NO: 4523 - RNA, 20 nt, synthetic construct
  misc_feature 1..20: note = spacer sequence
  source 1..20: mol_type = other RNA
aaaaatacaaaaattagcta

SEQ ID NO: 4524 - RNA, 20 nt, synthetic construct
  misc_feature 1..20: note = spacer sequence
  source 1..20: mol_type = other RNA
cagctactcgggaagctggg

SEQ ID NO: 4525 - RNA, 20 nt, synthetic construct
  misc_feature 1..20: note = spacer sequence
  source 1..20: mol_type = other RNA
ggaagctggggcaggagaat

SEQ ID NO: 4526 - RNA, 20 nt, synthetic construct
  misc_feature 1..20: note = spacer sequence
  source 1..20: mol_type = other RNA
cgagtagctgggactacagg

SEQ ID NO: 4527 - RNA, 20 nt, synthetic construct
  misc_feature 1..20: note = spacer sequence
  source 1..20: mol_type = other RNA
tgccccagcttcccgagtag

SEQ ID NO: 4528 - RNA, 20 nt, synthetic construct
  misc_feature 1..20: note = spacer sequence
  source 1..20: mol_type = other RNA
cctgccccagcttcccgagt

SEQ ID NO: 4529 - RNA, 20 nt, synthetic construct
  misc_feature 1..20: note = spacer sequence
  source 1..20: mol_type = other RNA
agcaattctcctgccccagc

SEQ ID NO: 4530 - RNA, 20 nt, synthetic construct
  misc_feature 1..20: note = spacer sequence
  source 1..20: mol_type = other RNA
aggaggcagaggttgcagtg

SEQ ID NO: 4531 - RNA, 20 nt, synthetic construct
  misc_feature 1..20: note = spacer sequence
  source 1..20: mol_type = other RNA
tggattcaagcaattctcct

SEQ ID NO: 4532 - RNA, 20 nt, synthetic construct
  misc_feature 1..20: note = spacer sequence
  source 1..20: mol_type = other RNA
gcctcctggattcaagcaat

SEQ ID NO: 4533 - RNA, 20 nt, synthetic construct
  misc_feature 1..20: note = spacer sequence
  source 1..20: mol_type = other RNA
ctgcaacctctgcctcctgg

SEQ ID NO: 4534 - RNA, 20 nt, synthetic construct
  misc_feature 1..20: note = spacer sequence
  source 1..20: mol_type = other RNA
tggctcactgcaacctctgc

SEQ ID NO: 4535 - RNA, 20 nt, synthetic construct
  misc_feature 1..20: note = spacer sequence
  source 1..20: mol_type = other RNA
cgccactgcactccagcctg

SEQ ID NO: 4536 - RNA, 20 nt, synthetic construct
  misc_feature 1..20: note = spacer sequence
  source 1..20: mol_type = other RNA
agcctgggcgacagagcgag

SEQ ID NO: 4537 - RNA, 20 nt, synthetic construct
  misc_feature 1..20: note = spacer sequence
  source 1..20: mol_type = other RNA
cccaggctggagtgcagtgg

SEQ ID NO: 4538 - RNA, 20 nt, synthetic construct
  misc_feature 1..20: note = spacer sequence
  source 1..20: mol_type = other RNA
gtcgcccaggctggagtgca

SEQ ID NO: 4539 - RNA, 20 nt, synthetic construct
  misc_feature 1..20: note = spacer sequence
  source 1..20: mol_type = other RNA
ctctgtcgcccaggctggag

SEQ ID NO: 4540 - RNA, 20 nt, synthetic construct
  misc_feature 1..20: note = spacer sequence
  source 1..20: mol_type = other RNA
cgctctgtcgcccaggctgg

SEQ ID NO: 4541 - RNA, 20 nt, synthetic construct
  misc_feature 1..20: note = spacer sequence
  source 1..20: mol_type = other RNA
gtcaccaaaaaaaaaaaaaa

SEQ ID NO: 4542 - RNA, 20 nt, synthetic construct
  misc_feature 1..20: note = spacer sequence
  source 1..20: mol_type = other RNA
ccaaaaaaaaaaaaaaagaa

SEQ ID NO: 4543 - RNA, 20 nt, synthetic construct
  misc_feature 1..20: note = spacer sequence
  source 1..20: mol_type = other RNA
ttttttttttttttggtgac

SEQ ID NO: 4544 - RNA, 20 nt, synthetic construct
  misc_feature 1..20: note = spacer sequence
  source 1..20: mol_type = other RNA
tttctttttttttttttttg

SEQ ID NO: 4545 - RNA, 20 nt, synthetic construct
  misc_feature 1..20: note = spacer sequence
  source 1..20: mol_type = other RNA
ttttttcttttctttttttt

SEQ ID NO: 4546 - RNA, 20 nt, synthetic construct
  misc_feature 1..20: note = spacer sequence
  source 1..20: mol_type = other RNA
aatggttttctttttttctt

SEQ ID NO: 4547 - RNA, 20 nt, synthetic construct
  misc_feature 1..20: note = spacer sequence
  source 1..20: mol_type = other RNA
gcccacatatttaacaattc

SEQ ID NO: 4548 - RNA, 20 nt, synthetic construct
  misc_feature 1..20: note = spacer sequence
  source 1..20: mol_type = other RNA
atcagcccacatatttaaca

SEQ ID NO: 4549 - RNA, 20 nt, synthetic construct
  misc_feature 1..20: note = spacer sequence
  source 1..20: mol_type = other RNA
tttctatcagcccacatatt

SEQ ID NO: 4550 - RNA, 20 nt, synthetic construct
  misc_feature 1..20: note = spacer sequence
  source 1..20: mol_type = other RNA
ataaatatatttttctcatt

SEQ ID NO: 4551 - RNA, 20 nt, synthetic construct
  misc_feature 1..20: note = spacer sequence
  source 1..20: mol_type = other RNA
catttcttctgttacctttt

SEQ ID NO: 4552 - RNA, 20 nt, synthetic construct
  misc_feature 1..20: note = spacer sequence
  source 1..20: mol_type = other RNA
tttcttctgttaccttttaa

SEQ ID NO: 4553 - RNA, 20 nt, synthetic construct
  misc_feature 1..20: note = spacer sequence
  source 1..20: mol_type = other RNA
tctgttaccttttaaaaaag

SEQ ID NO: 4554 - RNA, 20 nt, synthetic construct
  misc_feature 1..20: note = spacer sequence
  source 1..20: mol_type = other RNA
gttaccttttaaaaaaggca

SEQ ID NO: 4555 - RNA, 20 nt, synthetic construct
  misc_feature 1..20: note = spacer sequence
  source 1..20: mol_type = other RNA
tatgtattacatttatacat

SEQ ID NO: 4556 - RNA, 20 nt, synthetic construct
  misc_feature 1..20: note = spacer sequence
  source 1..20: mol_type = other RNA
tttttgtattatcatatgta

SEQ ID NO: 4557 - RNA, 20 nt, synthetic construct
  misc_feature 1..20: note = spacer sequence
  source 1..20: mol_type = other RNA
ctcttttttgtattatcata

SEQ ID NO: 4558 - RNA, 20 nt, synthetic construct
  misc_feature 1..20: note = spacer sequence
  source 1..20: mol_type = other RNA
tccctcttttttgtattatc

SEQ ID NO: 4559 - RNA, 20 nt, synthetic construct
  misc_feature 1..20: note = spacer sequence
  source 1..20: mol_type = other RNA
cttccctcttttttgtatta

SEQ ID NO: 4560 - RNA, 20 nt, synthetic construct
  misc_feature 1..20: note = spacer sequence
  source 1..20: mol_type = other RNA
attctcttccctcttttttg

SEQ ID NO: 4561 - RNA, 20 nt, synthetic construct
  misc_feature 1..20: note = spacer sequence
  source 1..20: mol_type = other RNA
atgttttatctgaattaaat

SEQ ID NO: 4562 - RNA, 20 nt, synthetic construct
  misc_feature 1..20: note = spacer sequence
  source 1..20: mol_type = other RNA
gaattaaattagtaataatc

SEQ ID NO: 4563 - RNA, 20 nt, synthetic construct
  misc_feature 1..20: note = spacer sequence
  source 1..20: mol_type = other RNA
gataaaacatagaaattttg

SEQ ID NO: 4564 - RNA, 20 nt, synthetic construct
  misc_feature 1..20: note = spacer sequence
  source 1..20: mol_type = other RNA
gaactatatttagataagat

SEQ ID NO: 4565 - RNA, 20 nt, synthetic construct
  misc_feature 1..20: note = spacer sequence
  source 1..20: mol_type = other RNA
gattattactaatttaattc

SEQ ID NO: 4566 - RNA, 20 nt, synthetic construct
  misc_feature 1..20: note = spacer sequence
  source 1..20: mol_type = other RNA
aaatatagttcagattatta

SEQ ID NO: 4567 - RNA, 20 nt, synthetic construct
  misc_feature 1..20: note = spacer sequence
  source 1..20: mol_type = other RNA
tatctaaatatagttcagat

SEQ ID NO: 4568 - RNA, 20 nt, synthetic construct
  misc_feature 1..20: note = spacer sequence
  source 1..20: mol_type = other RNA
aaatatcaagttgtacccct

SEQ ID NO: 4569 - RNA, 20 nt, synthetic construct
  misc_feature 1..20: note = spacer sequence
  source 1..20: mol_type = other RNA
agttgtaccccttaaatata

SEQ ID NO: 4570 - RNA, 20 nt, synthetic construct
  misc_feature 1..20: note = spacer sequence
  source 1..20: mol_type = other RNA
attatacctcaataaagctg

SEQ ID NO: 4571 - RNA, 20 nt, synthetic construct
  misc_feature 1..20: note = spacer sequence
  source 1..20: mol_type = other RNA
ataaagctgaaaaaattact

SEQ ID NO: 4572 - RNA, 20 nt, synthetic construct
  misc_feature 1..20: note = spacer sequence
  source 1..20: mol_type = other RNA
gctttattgaggtataattg

SEQ ID NO: 4573 - RNA, 20 nt, synthetic construct
  misc_feature 1..20: note = spacer sequence
  source 1..20: mol_type = other RNA
aagtaattttttcagcttta

SEQ ID NO: 4574 - RNA, 20 nt, synthetic construct
  misc_feature 1..20: note = spacer sequence
  source 1..20: mol_type = other RNA
caaagtaattttttcagctt

SEQ ID NO: 4575 - RNA, 20 nt, synthetic construct
  misc_feature 1..20: note = spacer sequence
  source 1..20: mol_type = other RNA
tattaaaaaatacatattgt

SEQ ID NO: 4576 - RNA, 20 nt, synthetic construct
  misc_feature 1..20: note = spacer sequence
  source 1..20: mol_type = other RNA
atactgcaatgactaagaaa

SEQ ID NO: 4577 - RNA, 20 nt, synthetic construct
  misc_feature 1..20: note = spacer sequence
  source 1..20: mol_type = other RNA
ttgcagtatggattacaata

SEQ ID NO: 4578 - RNA, 20 nt, synthetic construct
  misc_feature 1..20: note = spacer sequence
  source 1..20: mol_type = other RNA
tagtcattgcagtatggatt

SEQ ID NO: 4579 - RNA, 20 nt, synthetic construct
  misc_feature 1..20: note = spacer sequence
  source 1..20: mol_type = other RNA
ttttttaactatttaaaaat

SEQ ID NO: 4580 - RNA, 20 nt, synthetic construct
  misc_feature 1..20: note = spacer sequence
  source 1..20: mol_type = other RNA
gtgttacatattttttagta

SEQ ID NO: 4581 - RNA, 20 nt, synthetic construct
  misc_feature 1..20: note = spacer sequence
  source 1..20: mol_type = other RNA
gtgaaagaggggcagagaaa

SEQ ID NO: 4582 - RNA, 20 nt, synthetic construct
  misc_feature 1..20: note = spacer sequence
  source 1..20: mol_type = other RNA
ctgatttctgtgttacatat

SEQ ID NO: 4583 - RNA, 20 nt, synthetic construct
  misc_feature 1..20: note = spacer sequence
  source 1..20: mol_type = other RNA
ttcactgatttctgtgttac

SEQ ID NO: 4584 - RNA, 20 nt, synthetic construct
  misc_feature 1..20: note = spacer sequence
  source 1..20: mol_type = other RNA
gcccctctttcactgatttc

SEQ ID NO: 4585 - RNA, 20 nt, synthetic construct
  misc_feature 1..20: note = spacer sequence
  source 1..20: mol_type = other RNA
ctgcccctctttcactgatt

SEQ ID NO: 4586 - RNA, 20 nt, synthetic construct
  misc_feature 1..20: note = spacer sequence
  source 1..20: mol_type = other RNA
tatttttgtttctctgcccc

SEQ ID NO: 4587 - RNA, 20 nt, synthetic construct
  misc_feature 1..20: note = spacer sequence
  source 1..20: mol_type = other RNA
cctatttttgtttctctgcc

SEQ ID NO: 4588 - RNA, 20 nt, synthetic construct
  misc_feature 1..20: note = spacer sequence
  source 1..20: mol_type = other RNA
atatgtctcctatttttgtt

SEQ ID NO: 4589 - RNA, 20 nt, synthetic construct
  misc_feature 1..20: note = spacer sequence
  source 1..20: mol_type = other RNA
tgcctgcaatgctagtattt

SEQ ID NO: 4590 - RNA, 20 nt, synthetic construct
  misc_feature 1..20: note = spacer sequence
  source 1..20: mol_type = other RNA
caaaatactagcattgcagg

SEQ ID NO: 4591 - RNA, 20 nt, synthetic construct
  misc_feature 1..20: note = spacer sequence
  source 1..20: mol_type = other RNA
gcctcccaaaatactagcat

SEQ ID NO: 4592 - RNA, 20 nt, synthetic construct
  misc_feature 1..20: note = spacer sequence
  source 1..20: mol_type = other RNA
cctcagcctcccaaaatact

SEQ ID NO: 4593 - RNA, 20 nt, synthetic construct
  misc_feature 1..20: note = spacer sequence
  source 1..20: mol_type = other RNA
cacctcagcctcccaaaata

SEQ ID NO: 4594 - RNA, 20 nt, synthetic construct
  misc_feature 1..20: note = spacer sequence
  source 1..20: mol_type = other RNA
tctcacctcagcctcccaaa

SEQ ID NO: 4595 - RNA, 20 nt, synthetic construct
  misc_feature 1..20: note = spacer sequence
  source 1..20: mol_type = other RNA
agcaatcttctcacctcagc

SEQ ID NO: 4596 - RNA, 20 nt, synthetic construct
  misc_feature 1..20: note = spacer sequence
  source 1..20: mol_type = other RNA
ggaattcaagaccagactgg

SEQ ID NO: 4597 - RNA, 20 nt, synthetic construct
  misc_feature 1..20: note = spacer sequence
  source 1..20: mol_type = other RNA
tgagctcaagcaatcttctc

SEQ ID NO: 4598 - RNA, 20 nt, synthetic construct
  misc_feature 1..20: note = spacer sequence
  source 1..20: mol_type = other RNA
agaccagactgggcaacata

SEQ ID NO: 4599 - RNA, 20 nt, synthetic construct
  misc_feature 1..20: note = spacer sequence
  source 1..20: mol_type = other RNA
tgaattcctgagctcaagca

SEQ ID NO: 4600 - RNA, 20 nt, synthetic construct
  misc_feature 1..20: note = spacer sequence
  source 1..20: mol_type = other RNA
ggtcttgaattcctgagctc

SEQ ID NO: 4601 - RNA, 20 nt, synthetic construct
  misc_feature 1..20: note = spacer sequence
  source 1..20: mol_type = other RNA
ttatgttgcccagtctggtc

SEQ ID NO: 4602 - RNA, 20 nt, synthetic construct
  misc_feature 1..20: note = spacer sequence
  source 1..20: mol_type = other RNA
cattatgttgcccagtctgg

SEQ ID NO: 4603 - RNA, 20 nt, synthetic construct
  misc_feature 1..20: note = spacer sequence
  source 1..20: mol_type = other RNA
ctataaaattatacaaagaa

SEQ ID NO: 4604 - RNA, 20 nt, synthetic construct
  misc_feature 1..20: note = spacer sequence
  source 1..20: mol_type = other RNA
ataaaattatacaaagaaaa

SEQ ID NO: 4605 - RNA, 20 nt, synthetic construct
  misc_feature 1..20: note = spacer sequence
  source 1..20: mol_type = other RNA
ttgtataattttatagagat

SEQ ID NO: 4606 - RNA, 20 nt, synthetic construct
  misc_feature 1..20: note = spacer sequence
  source 1..20: mol_type = other RNA
tagctacttgggaggctaag

SEQ ID NO: 4607 - RNA, 20 nt, synthetic construct
  misc_feature 1..20: note = spacer sequence
  source 1..20: mol_type = other RNA
caagtagctaggactacagg

SEQ ID NO: 4608 - RNA, 20 nt, synthetic construct
  misc_feature 1..20: note = spacer sequence
  source 1..20: mol_type = other RNA
tagcctcccaagtagctagg

SEQ ID NO: 4609 - RNA, 20 nt, synthetic construct
  misc_feature 1..20: note = spacer sequence
  source 1..20: mol_type = other RNA
catcttagcctcccaagtag

SEQ ID NO: 4610 - RNA, 20 nt, synthetic construct
  misc_feature 1..20: note = spacer sequence
  source 1..20: mol_type = other RNA
tcccatcttagcctcccaag

SEQ ID NO: 4611 - RNA, 20 nt, synthetic construct
  misc_feature 1..20: note = spacer sequence
  source 1..20: mol_type = other RNA
cttgagcccaggagttcgag

SEQ ID NO: 4612 - RNA, 20 nt, synthetic construct
  misc_feature 1..20: note = spacer sequence
  source 1..20: mol_type = other RNA
tgagcccaggagttcgaggc

SEQ ID NO: 4613 - RNA, 20 nt, synthetic construct
  misc_feature 1..20: note = spacer sequence
  source 1..20: mol_type = other RNA
agagatcttcccatcttagc

SEQ ID NO: 4614 - RNA, 20 nt, synthetic construct
  misc_feature 1..20: note = spacer sequence
  source 1..20: mol_type = other RNA
tgggctcaagagatcttccc

SEQ ID NO: 4615 - RNA, 20 nt, synthetic construct
  misc_feature 1..20: note = spacer sequence
  source 1..20: mol_type = other RNA
aggctgcagtgagctgtgat

SEQ ID NO: 4616 - RNA, 20 nt, synthetic construct
  misc_feature 1..20: note = spacer sequence
  source 1..20: mol_type = other RNA
aactcctgggctcaagagat

SEQ ID NO: 4617 - RNA, 20 nt, synthetic construct
  misc_feature 1..20: note = spacer sequence
  source 1..20: mol_type = other RNA
ctgcagcctcgaactcctgg

SEQ ID NO: 4618 - RNA, 20 nt, synthetic construct
  misc_feature 1..20: note = spacer sequence
  source 1..20: mol_type = other RNA
cagctcactgcagcctcgaa

SEQ ID NO: 4619 - RNA, 20 nt, synthetic construct
  misc_feature 1..20: note = spacer sequence
  source 1..20: mol_type = other RNA
cgtcactgcactttagcctg

SEQ ID NO: 4620 - RNA, 20 nt, synthetic construct
  misc_feature 1..20: note = spacer sequence
  source 1..20: mol_type = other RNA
ctgcactttagcctgggcta

SEQ ID NO: 4621 - RNA, 20 nt, synthetic construct
  misc_feature 1..20: note = spacer sequence
  source 1..20: mol_type = other RNA
atagcccaggctaaagtgca

SEQ ID NO: 4622 - RNA, 20 nt, synthetic construct
  misc_feature 1..20: note = spacer sequence
  source 1..20: mol_type = other RNA
ttctatagcccaggctaaag

SEQ ID NO: 4623 - RNA, 20 nt, synthetic construct
  misc_feature 1..20: note = spacer sequence
  source 1..20: mol_type = other RNA
cattctatagcccaggctaa

SEQ ID NO: 4624 - RNA, 20 nt, synthetic construct
  misc_feature 1..20: note = spacer sequence
  source 1..20: mol_type = other RNA
aaaataataaaaaataaaaa

SEQ ID NO: 4625 - RNA, 20 nt, synthetic construct
  misc_feature 1..20: note = spacer sequence
  source 1..20: mol_type = other RNA
tttttttttttattttttat

SEQ ID NO: 4626 - RNA, 20 nt, synthetic construct
  misc_feature 1..20: note = spacer sequence
  source 1..20: mol_type = other RNA
tttgttgttgcttaatttac

SEQ ID NO: 4627 - RNA, 20 nt, synthetic construct
  misc_feature 1..20: note = spacer sequence
  source 1..20: mol_type = other RNA
aaacttattaattacattaa

SEQ ID NO: 4628 - RNA, 20 nt, synthetic construct
  misc_feature 1..20: note = spacer sequence
  source 1..20: mol_type = other RNA
catttaatgtaattaataag

SEQ ID NO: 4629 - RNA, 20 nt, synthetic construct
  misc_feature 1..20: note = spacer sequence
  source 1..20: mol_type = other RNA
aaacattccaataaaaaaca

SEQ ID NO: 4630 - RNA, 20 nt, synthetic construct
  misc_feature 1..20: note = spacer sequence
  source 1..20: mol_type = other RNA
aataaaaaacaagatatttg

SEQ ID NO: 4631 - RNA, 20 nt, synthetic construct
  misc_feature 1..20: note = spacer sequence
  source 1..20: mol_type = other RNA
tgttttttattggaatgttt

SEQ ID NO: 4632 - RNA, 20 nt, synthetic construct
  misc_feature 1..20: note = spacer sequence
  source 1..20: mol_type = other RNA
aaatatcttgttttttattg

SEQ ID NO: 4633 - RNA, 20 nt, synthetic construct
  misc_feature 1..20: note = spacer sequence
  source 1..20: mol_type = other RNA
aatccaaatatcttgttttt

SEQ ID NO: 4634 - RNA, 20 nt, synthetic construct
  misc_feature 1..20: note = spacer sequence
  source 1..20: mol_type = other RNA
aactataggcagtctgcaag

SEQ ID NO: 4635 - RNA, 20 nt, synthetic construct
  misc_feature 1..20: note = spacer sequence
  source 1..20: mol_type = other RNA
gcaagagttacaccttaggt

SEQ ID NO: 4636 - RNA, 20 nt, synthetic construct
  misc_feature 1..20: note = spacer sequence
  source 1..20: mol_type = other RNA
tgcagactgcctatagttag

SEQ ID NO: 4637 - RNA, 20 nt, synthetic construct
  misc_feature 1..20: note = spacer sequence
  source 1..20: mol_type = other RNA
aagacacaaataggtggaaa

SEQ ID NO: 4638 - RNA, 20 nt, synthetic construct
  misc_feature 1..20: note = spacer sequence
  source 1..20: mol_type = other RNA
ttgaacctaaggtgtaactc

SEQ ID NO: 4639 - RNA, 20 nt, synthetic construct
  misc_feature 1..20: note = spacer sequence
  source 1..20: mol_type = other RNA
acctatttgtgtctttgaac

SEQ ID NO: 4640 - RNA, 20 nt, synthetic construct
  misc_feature 1..20: note = spacer sequence
  source 1..20: mol_type = other RNA
atgtttttactttccaccta

SEQ ID NO: 4641 - RNA, 20 nt, synthetic construct
  misc_feature 1..20: note = spacer sequence
  source 1..20: mol_type = other RNA
ttttccatgtttttactttc

SEQ ID NO: 4642 - RNA, 20 nt, synthetic construct
  misc_feature 1..20: note = spacer sequence
  source 1..20: mol_type = other RNA
tagcatatctttttccatgt

SEQ ID NO: 4643 - RNA, 20 nt, synthetic construct
  misc_feature 1..20: note = spacer sequence
  source 1..20: mol_type = other RNA
agcctactattttcatagca

SEQ ID NO: 4644 - RNA, 20 nt, synthetic construct
  misc_feature 1..20: note = spacer sequence
  source 1..20: mol_type = other RNA
aaaatcctagcactttggga

SEQ ID NO: 4645 - RNA, 20 nt, synthetic construct
  misc_feature 1..20: note = spacer sequence
  source 1..20: mol_type = other RNA
tagcactttgggaggccaag

SEQ ID NO: 4646 - RNA, 20 nt, synthetic construct
  misc_feature 1..20: note = spacer sequence
  source 1..20: mol_type = other RNA
caaagtgctaggattttaga

SEQ ID NO: 4647 - RNA, 20 nt, synthetic construct
  misc_feature 1..20: note = spacer sequence
  source 1..20: mol_type = other RNA
caccttggcctcccaaagtg

SEQ ID NO: 4648 - RNA, 20 nt, synthetic construct
  misc_feature 1..20: note = spacer sequence
  source 1..20: mol_type = other RNA
tcccaccttggcctcccaaa

SEQ ID NO: 4649 - RNA, 20 nt, synthetic construct
  misc_feature 1..20: note = spacer sequence
  source 1..20: mol_type = other RNA
agcagtcctcccaccttggc

SEQ ID NO: 4650 - RNA, 20 nt, synthetic construct
  misc_feature 1..20: note = spacer sequence
  source 1..20: mol_type = other RNA
ggagtttaagatcaacctgg

SEQ ID NO: 4651 - RNA, 20 nt, synthetic construct
  misc_feature 1..20: note = spacer sequence
  source 1..20: mol_type = other RNA
tgagctcaagcagtcctccc

SEQ ID NO: 4652 - RNA, 20 nt, synthetic construct
  misc_feature 1..20: note = spacer sequence
  source 1..20: mol_type = other RNA
taaactcctgagctcaagca

SEQ ID NO: 4653 - RNA, 20 nt, synthetic construct
  misc_feature 1..20: note = spacer sequence
  source 1..20: mol_type = other RNA
acctgggcaatacagcaaaa

SEQ ID NO: 4654 - RNA, 20 nt, synthetic construct
  misc_feature 1..20: note = spacer sequence
  source 1..20: mol_type = other RNA
ctacaaaaaatacaaaaatt

SEQ ID NO: 4655 - RNA, 20 nt, synthetic construct
  misc_feature 1..20: note = spacer sequence
  source 1..20: mol_type = other RNA
acaaaaaatacaaaaattag

SEQ ID NO: 4656 - RNA, 20 nt, synthetic construct
  misc_feature 1..20: note = spacer sequence
  source 1..20: mol_type = other RNA
cagctactcagagactgagg

SEQ ID NO: 4657 - RNA, 20 nt, synthetic construct
  misc_feature 1..20: note = spacer sequence
  source 1..20: mol_type = other RNA
gagactgaggtgcgaagatc

SEQ ID NO: 4658 - RNA, 20 nt, synthetic construct
  misc_feature 1..20: note = spacer sequence
  source 1..20: mol_type = other RNA
gagtagctgggactacaggc

SEQ ID NO: 4659 - RNA, 20 nt, synthetic construct
  misc_feature 1..20: note = spacer sequence
  source 1..20: mol_type = other RNA
ctgagtagctgggactacag

SEQ ID NO: 4660 - RNA, 20 nt, synthetic construct
  misc_feature 1..20: note = spacer sequence
  source 1..20: mol_type = other RNA
gtctctgagtagctgggact

SEQ ID NO: 4661 - RNA, 20 nt, synthetic construct
  misc_feature 1..20: note = spacer sequence
  source 1..20: mol_type = other RNA
cacctcagtctctgagtagc

SEQ ID NO: 4662 - RNA, 20 nt, synthetic construct
  misc_feature 1..20: note = spacer sequence
  source 1..20: mol_type = other RNA
tcgcacctcagtctctgagt

SEQ ID NO: 4663 - RNA, 20 nt, synthetic construct
  misc_feature 1..20: note = spacer sequence
  source 1..20: mol_type = other RNA
ttgagcctcagagatcaagg

SEQ ID NO: 4664 - RNA, 20 nt, synthetic construct
  misc_feature 1..20: note = spacer sequence
  source 1..20: mol_type = other RNA
aggatcttcgcacctcagtc

SEQ ID NO: 4665 - RNA, 20 nt, synthetic construct
  misc_feature 1..20: note = spacer sequence
  source 1..20: mol_type = other RNA
gagatcaaggctgcagtgag

SEQ ID NO: 4666 - RNA, 20 nt, synthetic construct
  misc_feature 1..20: note = spacer sequence
  source 1..20: mol_type = other RNA
gaggctcaaggatcttcgca

SEQ ID NO: 4667 - RNA, 20 nt, synthetic construct
  misc_feature 1..20: note = spacer sequence
  source 1..20: mol_type = other RNA
ctgaggctcaaggatcttcg

SEQ ID NO: 4668 - RNA, 20 nt, synthetic construct
  misc_feature 1..20: note = spacer sequence
  source 1..20: mol_type = other RNA
aggctgcagtgagccgtaat

SEQ ID NO: 4669 - RNA, 20 nt, synthetic construct
  misc_feature 1..20: note = spacer sequence
  source 1..20: mol_type = other RNA
ctgcagccttgatctctgag

SEQ ID NO: 4670 - RNA, 20 nt, synthetic construct
  misc_feature 1..20: note = spacer sequence
  source 1..20: mol_type = other RNA
cccaggctgtagtgcagtgg

SEQ ID NO: 4671 - RNA, 20 nt, synthetic construct
  misc_feature 1..20: note = spacer sequence
  source 1..20: mol_type = other RNA
gtcacccaggctgtagtgca

SEQ ID NO: 4672 - RNA, 20 nt, synthetic construct
  misc_feature 1..20: note = spacer sequence
  source 1..20: mol_type = other RNA
ctgtcacccaggctgtagtg

SEQ ID NO: 4673 - RNA, 20 nt, synthetic construct
  misc_feature 1..20: note = spacer sequence
  source 1..20: mol_type = other RNA
gtctctgtcacccaggctgt

SEQ ID NO: 4674 - RNA, 20 nt, synthetic construct
  misc_feature 1..20: note = spacer sequence
  source 1..20: mol_type = other RNA
ctctgtctctgtcacccagg

SEQ ID NO: 4675 - RNA, 20 nt, synthetic construct
  misc_feature 1..20: note = spacer sequence
  source 1..20: mol_type = other RNA
cactctgtctctgtcaccca

SEQ ID NO: 4676 - RNA, 20 nt, synthetic construct
  misc_feature 1..20: note = spacer sequence
  source 1..20: mol_type = other RNA
caaaaaaaaaaaaaaaaaag

SEQ ID NO: 4677 - RNA, 20 nt, synthetic construct
  misc_feature 1..20: note = spacer sequence
  source 1..20: mol_type = other RNA
aaaaaaaaaaaaaaaaagta

SEQ ID NO: 4678 - RNA, 20 nt, synthetic construct
  misc_feature 1..20: note = spacer sequence
  source 1..20: mol_type = other RNA
tatggttacttttttttttt

SEQ ID NO: 4679 - RNA, 20 nt, synthetic construct
  misc_feature 1..20: note = spacer sequence
  source 1..20: mol_type = other RNA
cttatggttacttttttttt

SEQ ID NO: 4680 - RNA, 20 nt, synthetic construct
  misc_feature 1..20: note = spacer sequence
  source 1..20: mol_type = other RNA
ttagttatgtggctatcagc

SEQ ID NO: 4681 - RNA, 20 nt, synthetic construct
  misc_feature 1..20: note = spacer sequence
  source 1..20: mol_type = other RNA
gctaacataaactttaagtc

SEQ ID NO: 4682 - RNA, 20 nt, synthetic construct
  misc_feature 1..20: note = spacer sequence
  source 1..20: mol_type = other RNA
agaaatattactggagacaa

SEQ ID NO: 4683 - RNA, 20 nt, synthetic construct
  misc_feature 1..20: note = spacer sequence
  source 1..20: mol_type = other RNA
tgacttaaagtttatgttag

SEQ ID NO: 4684 - RNA, 20 nt, synthetic construct
  misc_feature 1..20: note = spacer sequence
  source 1..20: mol_type = other RNA
agtaatatttcttgacttaa

SEQ ID NO: 4685 - RNA, 20 nt, synthetic construct
  misc_feature 1..20: note = spacer sequence
  source 1..20: mol_type = other RNA
ccagtaatatttcttgactt

SEQ ID NO: 4686 - RNA, 20 nt, synthetic construct
  misc_feature 1..20: note = spacer sequence
  source 1..20: mol_type = other RNA
ttgtctccagtaatatttct

SEQ ID NO: 4687 - RNA, 20 nt, synthetic construct
  misc_feature 1..20: note = spacer sequence
  source 1..20: mol_type = other RNA
tcgttgtctccagtaatatt

SEQ ID NO: 4688 - RNA, 20 nt, synthetic construct
  misc_feature 1..20: note = spacer sequence
  source 1..20: mol_type = other RNA
ttactaaatgttcctcgttg

SEQ ID NO: 4689 - RNA, 20 nt, synthetic construct
  misc_feature 1..20: note = spacer sequence
  source 1..20: mol_type = other RNA
tttatcattactaaatgttc

SEQ ID NO: 4690 - RNA, 20 nt, synthetic construct
  misc_feature 1..20: note = spacer sequence
  source 1..20: mol_type = other RNA
atatgtcaggaatgtacaag

SEQ ID NO: 4691 - RNA, 20 nt, synthetic construct
  misc_feature 1..20: note = spacer sequence
  source 1..20: mol_type = other RNA
ggaatgtacaagtcataaat

SEQ ID NO: 4692 - RNA, 20 nt, synthetic construct
  misc_feature 1..20: note = spacer sequence
  source 1..20: mol_type = other RNA
tgacatattgactcttttat

SEQ ID NO: 4693 - RNA, 20 nt, synthetic construct
  misc_feature 1..20: note = spacer sequence
  source 1..20: mol_type = other RNA
taaatatgtacatcgctaat

SEQ ID NO: 4694 - RNA, 20 nt, synthetic construct
  misc_feature 1..20: note = spacer sequence
  source 1..20: mol_type = other RNA
ctaataaagcctcaaaaaca

SEQ ID NO: 4695 - RNA, 20 nt, synthetic construct
  misc_feature 1..20: note = spacer sequence
  source 1..20: mol_type = other RNA
aaaacatgaaacaaaactgg

SEQ ID NO: 4696 - RNA, 20 nt, synthetic construct
  misc_feature 1..20: note = spacer sequence
  source 1..20: mol_type = other RNA
tgtttttgaggctttattag

SEQ ID NO: 4697 - RNA, 20 nt, synthetic construct
  misc_feature 1..20: note = spacer sequence
  source 1..20: mol_type = other RNA
gccagttttgtttcatgttt

SEQ ID NO: 4698 - RNA, 20 nt, synthetic construct
  misc_feature 1..20: note = spacer sequence
  source 1..20: mol_type = other RNA
tttaattctgccagttttgt

SEQ ID NO: 4699 - RNA, 20 nt, synthetic construct
  misc_feature 1..20: note = spacer sequence
  source 1..20: mol_type = other RNA
cttttaattctgccagtttt

SEQ ID NO: 4700 - RNA, 20 nt, synthetic construct
  misc_feature 1..20: note = spacer sequence
  source 1..20: mol_type = other RNA
tatatctcttttaattctgc

SEQ ID NO: 4701 - RNA, 20 nt, synthetic construct
  misc_feature 1..20: note = spacer sequence
  source 1..20: mol_type = other RNA
tcttatatctcttttaattc

SEQ ID NO: 4702 - RNA, 20 nt, synthetic construct
  misc_feature 1..20: note = spacer sequence
  source 1..20: mol_type = other RNA
atatcttcttatatctcttt

SEQ ID NO: 4703 - RNA, 20 nt, synthetic construct
  misc_feature 1..20: note = spacer sequence
  source 1..20: mol_type = other RNA
acaacaatagttgaggatat

SEQ ID NO: 4704 - RNA, 20 nt, synthetic construct
  misc_feature 1..20: note = spacer sequence
  source 1..20: mol_type = other RNA
actattgttgttgaactgtc

SEQ ID NO: 4705 - RNA, 20 nt, synthetic construct
  misc_feature 1..20: note = spacer sequence
  source 1..20: mol_type = other RNA
tcaactattgttgttgaact

SEQ ID NO: 4706 - RNA, 20 nt, synthetic construct
  misc_feature 1..20: note = spacer sequence
  source 1..20: mol_type = other RNA
atattctattctaattgatg

SEQ ID NO: 4707 - RNA, 20 nt, synthetic construct
  misc_feature 1..20: note = spacer sequence
  source 1..20: mol_type = other RNA
attctaattgatgaaaaaat

SEQ ID NO: 4708 - RNA, 20 nt, synthetic construct
  misc_feature 1..20: note = spacer sequence
  source 1..20: mol_type = other RNA
aattgatgaaaaaattagac

SEQ ID NO: 4709 - RNA, 20 nt, synthetic construct
  misc_feature 1..20: note = spacer sequence
  source 1..20: mol_type = other RNA
attagaatagaatattgata

SEQ ID NO: 4710 - RNA, 20 nt, synthetic construct
  misc_feature 1..20: note = spacer sequence
  source 1..20: mol_type = other RNA
tcaattagaatagaatattg

SEQ ID NO: 4711 - RNA, 20 nt, synthetic construct
  misc_feature 1..20: note = spacer sequence
  source 1..20: mol_type = other RNA
aattttttcatcaattagaa

SEQ ID NO: 4712 - RNA, 20 nt, synthetic construct
  misc_feature 1..20: note = spacer sequence
  source 1..20: mol_type = other RNA
gcaaggatattaaagagtta

SEQ ID NO: 4713 - RNA, 20 nt, synthetic construct
  misc_feature 1..20: note = spacer sequence
  source 1..20: mol_type = other RNA
ttgctgatttattgtctaat

SEQ ID NO: 4714 - RNA, 20 nt, synthetic construct
  misc_feature 1..20: note = spacer sequence
  source 1..20: mol_type = other RNA
ttaatatccttgctgattta

SEQ ID NO: 4715 - RNA, 20 nt, synthetic construct
  misc_feature 1..20: note = spacer sequence
  source 1..20: mol_type = other RNA
aactctttaatatccttgct

SEQ ID NO: 4716 - RNA, 20 nt, synthetic construct
  misc_feature 1..20: note = spacer sequence
  source 1..20: mol_type = other RNA
cataggttaataatgttttc

SEQ ID NO: 4717 - RNA, 20 nt, synthetic construct
  misc_feature 1..20: note = spacer sequence
  source 1..20: mol_type = other RNA
attaggtcacataggttaat

SEQ ID NO: 4718 - RNA, 20 nt, synthetic construct
  misc_feature 1..20: note = spacer sequence
  source 1..20: mol_type = other RNA
aatgagtctcaactcattca

SEQ ID NO: 4719 - RNA, 20 nt, synthetic construct
  misc_feature 1..20: note = spacer sequence
  source 1..20: mol_type = other RNA
ttggacatatatcaattagg

SEQ ID NO: 4720 - RNA, 20 nt, synthetic construct
  misc_feature 1..20: note = spacer sequence
  source 1..20: mol_type = other RNA
caactcattcagtgagaaca

SEQ ID NO: 4721 - RNA, 20 nt, synthetic construct
  misc_feature 1..20: note = spacer sequence
  source 1..20: mol_type = other RNA
actcattcagtgagaacagt

SEQ ID NO: 4722 - RNA, 20 nt, synthetic construct
  misc_feature 1..20: note = spacer sequence
  source 1..20: mol_type = other RNA
ttcagtgagaacagttaata

SEQ ID NO: 4723 - RNA, 20 nt, synthetic construct
  misc_feature 1..20: note = spacer sequence
  source 1..20: mol_type = other RNA
gtgagaacagttaataaaga

SEQ ID NO: 4724 - RNA, 20 nt, synthetic construct
  misc_feature 1..20: note = spacer sequence
  source 1..20: mol_type = other RNA
ctgaatgagttgagactcat

SEQ ID NO: 4725 - RNA, 20 nt, synthetic construct
  misc_feature 1..20: note = spacer sequence
  source 1..20: mol_type = other RNA
cactgaatgagttgagactc

SEQ ID NO: 4726 - RNA, 20 nt, synthetic construct
  misc_feature 1..20: note = spacer sequence
  source 1..20: mol_type = other RNA
ttattaactgttctcactga

SEQ ID NO: 4727 - RNA, 20 nt, synthetic construct
  misc_feature 1..20: note = spacer sequence
  source 1..20: mol_type = other RNA
ggtaataaaaatgtctttat

SEQ ID NO: 4728 - RNA, 20 nt, synthetic construct
  misc_feature 1..20: note = spacer sequence
  source 1..20: mol_type = other RNA
gtaattttattttctggtaa

SEQ ID NO: 4729 - RNA, 20 nt, synthetic construct
  misc_feature 1..20: note = spacer sequence
  source 1..20: mol_type = other RNA
cttaacaaaatattaataca

SEQ ID NO: 4730 - RNA, 20 nt, synthetic construct
  misc_feature 1..20: note = spacer sequence
  source 1..20: mol_type = other RNA
gcaacatatataaaggatta

SEQ ID NO: 4731 - RNA, 20 nt, synthetic construct
  misc_feature 1..20: note = spacer sequence
  source 1..20: mol_type = other RNA
tttatatatgttgcagaatt

SEQ ID NO: 4732 - RNA, 20 nt, synthetic construct
  misc_feature 1..20: note = spacer sequence
  source 1..20: mol_type = other RNA
gaacaagtgggatttattat

SEQ ID NO: 4733 - RNA, 20 nt, synthetic construct
  misc_feature 1..20: note = spacer sequence
  source 1..20: mol_type = other RNA
gagtatataatcctttatat

SEQ ID NO: 4734 - RNA, 20 nt, synthetic construct
  misc_feature 1..20: note = spacer sequence
  source 1..20: mol_type = other RNA
cacttgttcagagtatataa

SEQ ID NO: 4735 - RNA, 20 nt, synthetic construct
  misc_feature 1..20: note = spacer sequence
  source 1..20: mol_type = other RNA
tataataaatcccacttgtt

SEQ ID NO: 4736 - RNA, 20 nt, synthetic construct
  misc_feature 1..20: note = spacer sequence
  source 1..20: mol_type = other RNA
aggttggttaacgtctgaaa

SEQ ID NO: 4737 - RNA, 20 nt, synthetic construct
  misc_feature 1..20: note = spacer sequence
  source 1..20: mol_type = other RNA
gaaacttgaccagtgtaata

SEQ ID NO: 4738 - RNA, 20 nt, synthetic construct
  misc_feature 1..20: note = spacer sequence
  source 1..20: mol_type = other RNA
gacgttaaccaaccttgaat

SEQ ID NO: 4739 - RNA, 20 nt, synthetic construct
  misc_feature 1..20: note = spacer sequence
  source 1..20: mol_type = other RNA
agtttcagacgttaaccaac

SEQ ID NO: 4740 - RNA, 20 nt, synthetic construct
  misc_feature 1..20: note = spacer sequence
  source 1..20: mol_type = other RNA
gtatagtatattacactggt

SEQ ID NO: 4741 - RNA, 20 nt, synthetic construct
  misc_feature 1..20: note = spacer sequence
  source 1..20: mol_type = other RNA
atcagtatagtatattacac

SEQ ID NO: 4742 - RNA, 20 nt, synthetic construct
  misc_feature 1..20: note = spacer sequence
  source 1..20: mol_type = other RNA
tttgttctatcagtatagta

SEQ ID NO: 4743 - RNA, 20 nt, synthetic construct
  misc_feature 1..20: note = spacer sequence
  source 1..20: mol_type = other RNA
tgtagtttttgtcctttgtt

SEQ ID NO: 4744 - RNA, 20 nt, synthetic construct
  misc_feature 1..20: note = spacer sequence
  source 1..20: mol_type = other RNA
tctcaataatagatgcagaa

SEQ ID NO: 4745 - RNA, 20 nt, synthetic construct
  misc_feature 1..20: note = spacer sequence
  source 1..20: mol_type = other RNA
caataatagatgcagaaata

SEQ ID NO: 4746 - RNA, 20 nt, synthetic construct
  misc_feature 1..20: note = spacer sequence
  source 1..20: mol_type = other RNA
ataatagatgcagaaatacc

SEQ ID NO: 4747 - RNA, 20 nt, synthetic construct
  misc_feature 1..20: note = spacer sequence
  source 1..20: mol_type = other RNA
attattgagaggatcatgta

SEQ ID NO: 4748 - RNA, 20 nt, synthetic construct
  misc_feature 1..20: note = spacer sequence
  source 1..20: mol_type = other RNA
gcatctattattgagaggat

SEQ ID NO: 4749 - RNA, 20 nt, synthetic construct
  misc_feature 1..20: note = spacer sequence
  source 1..20: mol_type = other RNA
aacaaaatctaacactcttt

SEQ ID NO: 4750 - RNA, 20 nt, synthetic construct
  misc_feature 1..20: note = spacer sequence
  source 1..20: mol_type = other RNA
aacactctttcatgttaaaa

SEQ ID NO: 4751 - RNA, 20 nt, synthetic construct
  misc_feature 1..20: note = spacer sequence
  source 1..20: mol_type = other RNA
ttcatgttaaaaactctcaa

SEQ ID NO: 4752 - RNA, 20 nt, synthetic construct
  misc_feature 1..20: note = spacer sequence
  source 1..20: mol_type = other RNA
tgttaaaaactctcaacaaa

SEQ ID NO: 4753 - RNA, 20 nt, synthetic construct
  misc_feature 1..20: note = spacer sequence
  source 1..20: mol_type = other RNA
caacaaactaggaatagatg

SEQ ID NO: 4754 - RNA, 20 nt, synthetic construct
  misc_feature 1..20: note = spacer sequence
  source 1..20: mol_type = other RNA
acaaactaggaatagatggg

SEQ ID NO: 4755 - RNA, 20 nt, synthetic construct
  misc_feature 1..20: note = spacer sequence
  source 1..20: mol_type = other RNA
tagtttgttgagagttttta

SEQ ID NO: 4756 - RNA, 20 nt, synthetic construct
  misc_feature 1..20: note = spacer sequence
  source 1..20: mol_type = other RNA
attcctagtttgttgagagt

SEQ ID NO: 4757 - RNA, 20 nt, synthetic construct
  misc_feature 1..20: note = spacer sequence
  source 1..20: mol_type = other RNA
catctattcctagtttgttg

SEQ ID NO: 4758 - RNA, 20 nt, synthetic construct
  misc_feature 1..20: note = spacer sequence
  source 1..20: mol_type = other RNA
tcaacctggataaagtgcat

SEQ ID NO: 4759 - RNA, 20 nt, synthetic construct
  misc_feature 1..20: note = spacer sequence
  source 1..20: mol_type = other RNA
acctggataaagtgcatcta

SEQ ID NO: 4760 - RNA, 20 nt, synthetic construct
  misc_feature 1..20: note = spacer sequence
  source 1..20: mol_type = other RNA
aggttgaggaagttcccatc

SEQ ID NO: 4761 - RNA, 20 nt, synthetic construct
  misc_feature 1..20: note = spacer sequence
  source 1..20: mol_type = other RNA
atgaaacacccacagttaac

SEQ ID NO: 4762 - RNA, 20 nt, synthetic construct
  misc_feature 1..20: note = spacer sequence
  source 1..20: mol_type = other RNA
tagatgcactttatccaggt

SEQ ID NO: 4763 - RNA, 20 nt, synthetic construct
  misc_feature 1..20: note = spacer sequence
  source 1..20: mol_type = other RNA
tacttaacagtaaaagactg

SEQ ID NO: 4764 - RNA, 20 nt, synthetic construct
  misc_feature 1..20: note = spacer sequence
  source 1..20: mol_type = other RNA
tttactgttaagtatgatgt

SEQ ID NO: 4765 - RNA, 20 nt, synthetic construct
  misc_feature 1..20: note = spacer sequence
  source 1..20: mol_type = other RNA
gtcttttactgttaagtatg

SEQ ID NO: 4766 - RNA, 20 nt, synthetic construct
  misc_feature 1..20: note = spacer sequence
  source 1..20: mol_type = other RNA
ctgaaatgtcaggaacaatg

SEQ ID NO: 4767 - RNA, 20 nt, synthetic construct
  misc_feature 1..20: note = spacer sequence
  source 1..20: mol_type = other RNA
gggaaatgttcagtctttta

SEQ ID NO: 4768 - RNA, 20 nt, synthetic construct
  misc_feature 1..20: note = spacer sequence
  source 1..20: mol_type = other RNA
ggaacaatgcaaaatgtcag

SEQ ID NO: 4769 - RNA, 20 nt, synthetic construct
  misc_feature 1..20: note = spacer sequence
  source 1..20: mol_type = other RNA
tgacatttcagggaaatgtt

SEQ ID NO: 4770 - RNA, 20 nt, synthetic construct
  misc_feature 1..20: note = spacer sequence
  source 1..20: mol_type = other RNA
gttcttgctacttctattca

SEQ ID NO: 4771 - RNA, 20 nt, synthetic construct
  misc_feature 1..20: note = spacer sequence
  source 1..20: mol_type = other RNA
tgctacttctattcaacact

SEQ ID NO: 4772 - RNA, 20 nt, synthetic construct
  misc_feature 1..20: note = spacer sequence
  source 1..20: mol_type = other RNA
attcaacactgccctggggg

SEQ ID NO: 4773 - RNA, 20 nt, synthetic construct
  misc_feature 1..20: note = spacer sequence
  source 1..20: mol_type = other RNA
acactgccctgggggtccca

SEQ ID NO: 4774 - RNA, 20 nt, synthetic construct
  misc_feature 1..20: note = spacer sequence
  source 1..20: mol_type = other RNA
cagacagtgttataaggcca

SEQ ID NO: 4775 - RNA, 20 nt, synthetic construct
  misc_feature 1..20: note = spacer sequence
  source 1..20: mol_type = other RNA
gggacccccagggcagtgtt

SEQ ID NO: 4776 - RNA, 20 nt, synthetic construct
  misc_feature 1..20: note = spacer sequence
  source 1..20: mol_type = other RNA
ttatggccttataacactgt

SEQ ID NO: 4777 - RNA, 20 nt, synthetic construct
  misc_feature 1..20: note = spacer sequence
  source 1..20: mol_type = other RNA
tctttatggccttataacac

SEQ ID NO: 4778 - RNA, 20 nt, synthetic construct
  misc_feature 1..20: note = spacer sequence
  source 1..20: mol_type = other RNA
tttttcatctttatggcctt

SEQ ID NO: 4779 - RNA, 20 nt, synthetic construct
  misc_feature 1..20: note = spacer sequence
  source 1..20: mol_type = other RNA
gtcttttttcatctttatgg

SEQ ID NO: 4780 - RNA, 20 nt, synthetic construct
  misc_feature 1..20: note = spacer sequence
  source 1..20: mol_type = other RNA
acttcagtcttttttcatct

SEQ ID NO: 4781 - RNA, 20 nt, synthetic construct
  misc_feature 1..20: note = spacer sequence
  source 1..20: mol_type = other RNA
ttaaagaagatatacaaatt

SEQ ID NO: 4782 - RNA, 20 nt, synthetic construct
  misc_feature 1..20: note = spacer sequence
  source 1..20: mol_type = other RNA
ttaatgaaatgtccacttca

SEQ ID NO: 4783 - RNA, 20 nt, synthetic construct
  misc_feature 1..20: note = spacer sequence
  source 1..20: mol_type = other RNA
tctttaatgaaatgtccact

SEQ ID NO: 4784 - RNA, 20 nt, synthetic construct
  misc_feature 1..20: note = spacer sequence
  source 1..20: mol_type = other RNA
gcattatgataaggtgctca

SEQ ID NO: 4785 - RNA, 20 nt, synthetic construct
  misc_feature 1..20: note = spacer sequence
  source 1..20: mol_type = other RNA
taatgctgattagcaatttg

SEQ ID NO: 4786 - RNA, 20 nt, synthetic construct
  misc_feature 1..20: note = spacer sequence
  source 1..20: mol_type = other RNA
acatcattagtcattagaaa

SEQ ID NO: 4787 - RNA, 20 nt, synthetic construct
  misc_feature 1..20: note = spacer sequence
  source 1..20: mol_type = other RNA
ttagtcattagaaaaatgca

SEQ ID NO: 4788 - RNA, 20 nt, synthetic construct
  misc_feature 1..20: note = spacer sequence
  source 1..20: mol_type = other RNA
ttagaaaaatgcaaattacg

SEQ ID NO: 4789 - RNA, 20 nt, synthetic construct
  misc_feature 1..20: note = spacer sequence
  source 1..20: mol_type = other RNA
aatgactaatgatgttgagc

SEQ ID NO: 4790 - RNA, 20 nt, synthetic construct
  misc_feature 1..20: note = spacer sequence
  source 1..20: mol_type = other RNA
ttgtaaccgtaatttgcatt

SEQ ID NO: 4791 - RNA, 20 nt, synthetic construct
  misc_feature 1..20: note = spacer sequence
  source 1..20: mol_type = other RNA
ttagaatggctgtaatcaaa

SEQ ID NO: 4792 - RNA, 20 nt, synthetic construct
  misc_feature 1..20: note = spacer sequence
  source 1..20: mol_type = other RNA
aatgaacgtatagtagtatt

SEQ ID NO: 4793 - RNA, 20 nt, synthetic construct
  misc_feature 1..20: note = spacer sequence
  source 1..20: mol_type = other RNA
aaaaagaaaaacaataccaa

SEQ ID NO: 4794 - RNA, 20 nt, synthetic construct
  misc_feature 1..20: note = spacer sequence
  source 1..20: mol_type = other RNA
tttttgattacagccattct

SEQ ID NO: 4795 - RNA, 20 nt, synthetic construct
  misc_feature 1..20: note = spacer sequence
  source 1..20: mol_type = other RNA
ccaacacttggtattgtttt

SEQ ID NO: 4796 - RNA, 20 nt, synthetic construct
  misc_feature 1..20: note = spacer sequence
  source 1..20: mol_type = other RNA
tcaccaacacttggtattgt

SEQ ID NO: 4797 - RNA, 20 nt, synthetic construct
  misc_feature 1..20: note = spacer sequence
  source 1..20: mol_type = other RNA
ccatcctcaccaacacttgg

SEQ ID NO: 4798 - RNA, 20 nt, synthetic construct
  misc_feature 1..20: note = spacer sequence
  source 1..20: mol_type = other RNA
ccccatcctcaccaacactt

SEQ ID NO: 4799 - RNA, 20 nt, synthetic construct
  misc_feature 1..20: note = spacer sequence
  source 1..20: mol_type = other RNA
attttctccccatcctcacc

SEQ ID NO: 4800 - RNA, 20 nt, synthetic construct
  misc_feature 1..20: note = spacer sequence
  source 1..20: mol_type = other RNA
tacgttgctgatggaaatgt

SEQ ID NO: 4801 - RNA, 20 nt, synthetic construct
  misc_feature 1..20: note = spacer sequence
  source 1..20: mol_type = other RNA
gcaacgtatgatggttccat

SEQ ID NO: 4802 - RNA, 20 nt, synthetic construct
  misc_feature 1..20: note = spacer sequence
  source 1..20: mol_type = other RNA
atcagcaacgtatgatggtt

SEQ ID NO: 4803 - RNA, 20 nt, synthetic construct
  misc_feature 1..20: note = spacer sequence
  source 1..20: mol_type = other RNA
ctttacatttccatcagcaa

SEQ ID NO: 4804 - RNA, 20 nt, synthetic construct
  misc_feature 1..20: note = spacer sequence
  source 1..20: mol_type = other RNA
acatcactttacatttccat

SEQ ID NO: 4805 - RNA, 20 nt, synthetic construct
  misc_feature 1..20: note = spacer sequence
  source 1..20: mol_type = other RNA
aagtgtctacatcactttac

SEQ ID NO: 4806 - RNA, 20 nt, synthetic construct
  misc_feature 1..20: note = spacer sequence
  source 1..20: mol_type = other RNA
ttggttttttaacttttgtt

SEQ ID NO: 4807 - RNA, 20 nt, synthetic construct
  misc_feature 1..20: note = spacer sequence
  source 1..20: mol_type = other RNA
ctttggttttttaacttttg

SEQ ID NO: 4808 - RNA, 20 nt, synthetic construct
  misc_feature 1..20: note = spacer sequence
  source 1..20: mol_type = other RNA
gaggcatgaatgccagtgtt

SEQ ID NO: 4809 - RNA, 20 nt, synthetic construct
  misc_feature 1..20: note = spacer sequence
  source 1..20: mol_type = other RNA
gaacacatatggttttattt

SEQ ID NO: 4810 - RNA, 20 nt, synthetic construct
  misc_feature 1..20: note = spacer sequence
  source 1..20: mol_type = other RNA
tgcctctgaacacatatggt

SEQ ID NO: 4811 - RNA, 20 nt, synthetic construct
  misc_feature 1..20: note = spacer sequence
  source 1..20: mol_type = other RNA
taatattcaagaactggaaa

SEQ ID NO: 4812 - RNA, 20 nt, synthetic construct
  misc_feature 1..20: note = spacer sequence
  source 1..20: mol_type = other RNA
agaactggaaatactcctgt

SEQ ID NO: 4813 - RNA, 20 nt, synthetic construct
  misc_feature 1..20: note = spacer sequence
  source 1..20: mol_type = other RNA
tgaatattatgaataatgct

SEQ ID NO: 4814 - RNA, 20 nt, synthetic construct
  misc_feature 1..20: note = spacer sequence
  source 1..20: mol_type = other RNA
agttcttgaatattatgaat

SEQ ID NO: 4815 - RNA, 20 nt, synthetic construct
  misc_feature 1..20: note = spacer sequence
  source 1..20: mol_type = other RNA
tgtatgcctgtctaaggctg

SEQ ID NO: 4816 - RNA, 20 nt, synthetic construct
  misc_feature 1..20: note = spacer sequence
  source 1..20: mol_type = other RNA
aaggctgttgtaacaaacta

SEQ ID NO: 4817 - RNA, 20 nt, synthetic construct
  misc_feature 1..20: note = spacer sequence
  source 1..20: mol_type = other RNA
agccgtgtgcatggtagttt

SEQ ID NO: 4818 - RNA, 20 nt, synthetic construct
  misc_feature 1..20: note = spacer sequence
  source 1..20: mol_type = other RNA
tacctgtaatctcagcactt

SEQ ID NO: 4819 - RNA, 20 nt, synthetic construct
  misc_feature 1..20: note = spacer sequence
  source 1..20: mol_type = other RNA
cagcactttgggaagccgag

SEQ ID NO: 4820 - RNA, 20 nt, synthetic construct
  misc_feature 1..20: note = spacer sequence
  source 1..20: mol_type = other RNA
gcactttgggaagccgagga

SEQ ID NO: 4821 - RNA, 20 nt, synthetic construct
  misc_feature 1..20: note = spacer sequence
  source 1..20: mol_type = other RNA
caaagtgctgagattacagg

SEQ ID NO: 4822 - RNA, 20 nt, synthetic construct
  misc_feature 1..20: note = spacer sequence
  source 1..20: mol_type = other RNA
gcttcccaaagtgctgagat

SEQ ID NO: 4823 - RNA, 20 nt, synthetic construct
  misc_feature 1..20: note = spacer sequence
  source 1..20: mol_type = other RNA
tcggcttcccaaagtgctga

SEQ ID NO: 4824 - RNA, 20 nt, synthetic construct
  misc_feature 1..20: note = spacer sequence
  source 1..20: mol_type = other RNA
acctcctcggcttcccaaag

SEQ ID NO: 4825 - RNA, 20 nt, synthetic construct
  misc_feature 1..20: note = spacer sequence
  source 1..20: mol_type = other RNA
cctgaggtcaggagattgag

SEQ ID NO: 4826 - RNA, 20 nt, synthetic construct
  misc_feature 1..20: note = spacer sequence
  source 1..20: mol_type = other RNA
ggtgatccacctcctcggct

SEQ ID NO: 4827 - RNA, 20 nt, synthetic construct
  misc_feature 1..20: note = spacer sequence
  source 1..20: mol_type = other RNA
ggagattgagaccagcctgg

SEQ ID NO: 4828 - RNA, 20 nt, synthetic construct
  misc_feature 1..20: note = spacer sequence
  source 1..20: mol_type = other RNA
tgacctcaggtgatccacct

SEQ ID NO: 4829 - RNA, 20 nt, synthetic construct
  misc_feature 1..20: note = spacer sequence
  source 1..20: mol_type = other RNA
cctgacctcaggtgatccac

SEQ ID NO: 4830 - RNA, 20 nt, synthetic construct
  misc_feature 1..20: note = spacer sequence
  source 1..20: mol_type = other RNA
atctcctgacctcaggtgat

SEQ ID NO: 4831 - RNA, 20 nt, synthetic construct
  misc_feature 1..20: note = spacer sequence
  source 1..20: mol_type = other RNA
caatctcctgacctcaggtg

SEQ ID NO: 4832 - RNA, 20 nt, synthetic construct
  misc_feature 1..20: note = spacer sequence
  source 1..20: mol_type = other RNA
tggccaggctggtctcaatc

SEQ ID NO: 4833 - RNA, 20 nt, synthetic construct
  misc_feature 1..20: note = spacer sequence
  source 1..20: mol_type = other RNA
ctactgaaaacacaaaaaat

SEQ ID NO: 4834 - RNA, 20 nt, synthetic construct
  misc_feature 1..20: note = spacer sequence
  source 1..20: mol_type = other RNA
actgaaaacacaaaaaatga

SEQ ID NO: 4835 - RNA, 20 nt, synthetic construct
  misc_feature 1..20: note = spacer sequence
  source 1..20: mol_type = other RNA
gtagagacagggttttgcca

SEQ ID NO: 4836 - RNA, 20 nt, synthetic construct
  misc_feature 1..20: note = spacer sequence
  source 1..20: mol_type = other RNA
ttttttgtgttttcagtaga

SEQ ID NO: 4837 - RNA, 20 nt, synthetic construct
  misc_feature 1..20: note = spacer sequence
  source 1..20: mol_type = other RNA
cagctacttgggaggctaag

SEQ ID NO: 4838 - RNA, 20 nt, synthetic construct
  misc_feature 1..20: note = spacer sequence
  source 1..20: mol_type = other RNA
caagtagctgggattacagg

SEQ ID NO: 4839 - RNA, 20 nt, synthetic construct
  misc_feature 1..20: note = spacer sequence
  source 1..20: mol_type = other RNA
tgccttagcctcccaagtag

SEQ ID NO: 4840 - RNA, 20 nt, synthetic construct
  misc_feature 1..20: note = spacer sequence
  source 1..20: mol_type = other RNA
cctgccttagcctcccaagt

SEQ ID NO: 4841 - RNA, 20 nt, synthetic construct
  misc_feature 1..20: note = spacer sequence
  source 1..20: mol_type = other RNA
agcaattctcctgccttagc

SEQ ID NO: 4842 - RNA, 20 nt, synthetic construct
  misc_feature 1..20: note = spacer sequence
  source 1..20: mol_type = other RNA
ggaggtggaggttgcagtga

SEQ ID NO: 4843 - RNA, 20 nt, synthetic construct
  misc_feature 1..20: note = spacer sequence
  source 1..20: mol_type = other RNA
cgagttcaagcaattctcct

SEQ ID NO: 4844 - RNA, 20 nt, synthetic construct
  misc_feature 1..20: note = spacer sequence
  source 1..20: mol_type = other RNA
acctcccgagttcaagcaat

SEQ ID NO: 4845 - RNA, 20 nt, synthetic construct
  misc_feature 1..20: note = spacer sequence
  source 1..20: mol_type = other RNA
ctgcaacctccacctcccga

SEQ ID NO: 4846 - RNA, 20 nt, synthetic construct
  misc_feature 1..20: note = spacer sequence
  source 1..20: mol_type = other RNA
gctcactgcaacctccacct

SEQ ID NO: 4847 - RNA, 20 nt, synthetic construct
  misc_feature 1..20: note = spacer sequence
  source 1..20: mol_type = other RNA
cggctcactgcaacctccac

SEQ ID NO: 4848 - RNA, 20 nt, synthetic construct
  misc_feature 1..20: note = spacer sequence
  source 1..20: mol_type = other RNA
tgccattgcactccagcctg

SEQ ID NO: 4849 - RNA, 20 nt, synthetic construct
  misc_feature 1..20: note = spacer sequence
  source 1..20: mol_type = other RNA
agcctggctgacagagagag

SEQ ID NO: 4850 - RNA, 20 nt, synthetic construct
  misc_feature 1..20: note = spacer sequence
  source 1..20: mol_type = other RNA
gccaggctggagtgcaatgg

SEQ ID NO: 4851 - RNA, 20 nt, synthetic construct
  misc_feature 1..20: note = spacer sequence
  source 1..20: mol_type = other RNA
gtcagccaggctggagtgca

SEQ ID NO: 4852 - RNA, 20 nt, synthetic construct
  misc_feature 1..20: note = spacer sequence
  source 1..20: mol_type = other RNA
ctgtcagccaggctggagtg

SEQ ID NO: 4853 - RNA, 20 nt, synthetic construct
  misc_feature 1..20: note = spacer sequence
  source 1..20: mol_type = other RNA
ctctgtcagccaggctggag

SEQ ID NO: 4854 - RNA, 20 nt, synthetic construct
  misc_feature 1..20: note = spacer sequence
  source 1..20: mol_type = other RNA
ctctctgtcagccaggctgg

SEQ ID NO: 4855 - RNA, 20 nt, synthetic construct
  misc_feature 1..20: note = spacer sequence
  source 1..20: mol_type = other RNA
gtctcagaaaaacaaacaaa

SEQ ID NO: 4856 - RNA, 20 nt, synthetic construct
  misc_feature 1..20: note = spacer sequence
  source 1..20: mol_type = other RNA
cagaaaaacaaacaaaccag

SEQ ID NO: 4857 - RNA, 20 nt, synthetic construct
  misc_feature 1..20: note = spacer sequence
  source 1..20: mol_type = other RNA
gaaaaacaaacaaaccagaa

SEQ ID NO: 4858 - RNA, 20 nt, synthetic construct
  misc_feature 1..20: note = spacer sequence
  source 1..20: mol_type = other RNA
gagacagagtctctctctgt

SEQ ID NO: 4859 - RNA, 20 nt, synthetic construct
  misc_feature 1..20: note = spacer sequence
  source 1..20: mol_type = other RNA
ggtttgtttgtttttctgag

SEQ ID NO: 4860 - RNA, 20 nt, synthetic construct
  misc_feature 1..20: note = spacer sequence
  source 1..20: mol_type = other RNA
gtttgtggtagttgtttttc

SEQ ID NO: 4861 - RNA, 20 nt, synthetic construct
  misc_feature 1..20: note = spacer sequence
  source 1..20: mol_type = other RNA
gttatataagccactcagtt

SEQ ID NO: 4862 - RNA, 20 nt, synthetic construct
  misc_feature 1..20: note = spacer sequence
  source 1..20: mol_type = other RNA
catagttccagaggctagga

SEQ ID NO: 4863 - RNA, 20 nt, synthetic construct
  misc_feature 1..20: note = spacer sequence
  source 1..20: mol_type = other RNA
tagttccagaggctaggaga

SEQ ID NO: 4864 - RNA, 20 nt, synthetic construct
  misc_feature 1..20: note = spacer sequence
  source 1..20: mol_type = other RNA
agaggctaggagagatgaag

SEQ ID NO: 4865 - RNA, 20 nt, synthetic construct
  misc_feature 1..20: note = spacer sequence
  source 1..20: mol_type = other RNA
ggaactatgagacaatgtct

SEQ ID NO: 4866 - RNA, 20 nt, synthetic construct
  misc_feature 1..20: note = spacer sequence
  source 1..20: mol_type = other RNA
tagcctctggaactatgaga

SEQ ID NO: 4867 - RNA, 20 nt, synthetic construct
  misc_feature 1..20: note = spacer sequence
  source 1..20: mol_type = other RNA
cctagcctctggaactatga

SEQ ID NO: 4868 - RNA, 20 nt, synthetic construct
  misc_feature 1..20: note = spacer sequence
  source 1..20: mol_type = other RNA
ctcctagcctctggaactat

SEQ ID NO: 4869 - RNA, 20 nt, synthetic construct
  misc_feature 1..20: note = spacer sequence
  source 1..20: mol_type = other RNA
tctctcctagcctctggaac

SEQ ID NO: 4870 - RNA, 20 nt, synthetic construct
  misc_feature 1..20: note = spacer sequence
  source 1..20: mol_type = other RNA
gcaaggctggttccttctga

SEQ ID NO: 4871 - RNA, 20 nt, synthetic construct
  misc_feature 1..20: note = spacer sequence
  source 1..20: mol_type = other RNA
ttctgaggctgtgaagaatc

SEQ ID NO: 4872 - RNA, 20 nt, synthetic construct
  misc_feature 1..20: note = spacer sequence
  source 1..20: mol_type = other RNA
gaggctgtgaagaatctgct

SEQ ID NO: 4873 - RNA, 20 nt, synthetic construct
  misc_feature 1..20: note = spacer sequence
  source 1..20: mol_type = other RNA
gaaggaaccagccttgctga

SEQ ID NO: 4874 - RNA, 20 nt, synthetic construct
  misc_feature 1..20: note = spacer sequence
  source 1..20: mol_type = other RNA
cagcctcagaaggaaccagc

SEQ ID NO: 4875 - RNA, 20 nt, synthetic construct
  misc_feature 1..20: note = spacer sequence
  source 1..20: mol_type = other RNA
tcacagcctcagaaggaacc

SEQ ID NO: 4876 - RNA, 20 nt, synthetic construct
  misc_feature 1..20: note = spacer sequence
  source 1..20: mol_type = other RNA
gctccatgcctctcccctag

SEQ ID NO: 4877 - RNA, 20 nt, synthetic construct
  misc_feature 1..20: note = spacer sequence
  source 1..20: mol_type = other RNA
atgcctctcccctagctttt

SEQ ID NO: 4878 - RNA, 20 nt, synthetic construct
  misc_feature 1..20: note = spacer sequence
  source 1..20: mol_type = other RNA
cccctagctttttggggttt

SEQ ID NO: 4879 - RNA, 20 nt, synthetic construct
  misc_feature 1..20: note = spacer sequence
  source 1..20: mol_type = other RNA
cctagctttttggggtttgc

SEQ ID NO: 4880 - RNA, 20 nt, synthetic construct
  misc_feature 1..20: note = spacer sequence
  source 1..20: mol_type = other RNA
gcaaaccccaaaaagctagg

SEQ ID NO: 4881 - RNA, 20 nt, synthetic construct
  misc_feature 1..20: note = spacer sequence
  source 1..20: mol_type = other RNA
ggtgttctttggcttgtaga

SEQ ID NO: 4882 - RNA, 20 nt, synthetic construct
  misc_feature 1..20: note = spacer sequence
  source 1..20: mol_type = other RNA
ttggcttgtagaagcaccac

SEQ ID NO: 4883 - RNA, 20 nt, synthetic construct
  misc_feature 1..20: note = spacer sequence
  source 1..20: mol_type = other RNA
acaagccaaagaacaccaga

SEQ ID NO: 4884 - RNA, 20 nt, synthetic construct
  misc_feature 1..20: note = spacer sequence
  source 1..20: mol_type = other RNA
ctgcctttatattcacatgg

SEQ ID NO: 4885 - RNA, 20 nt, synthetic construct
  misc_feature 1..20: note = spacer sequence
  source 1..20: mol_type = other RNA
gcctttatattcacatgggg

SEQ ID NO: 4886 - RNA, 20 nt, synthetic construct
  misc_feature 1..20: note = spacer sequence
  source 1..20: mol_type = other RNA
catgggggtgttctccctgt

SEQ ID NO: 4887 - RNA, 20 nt, synthetic construct
  misc_feature 1..20: note = spacer sequence
  source 1..20: mol_type = other RNA
ccctgtgtgcttatgtccaa

SEQ ID NO: 4888 - RNA, 20 nt, synthetic construct
  misc_feature 1..20: note = spacer sequence
  source 1..20: mol_type = other RNA
ctgtgtgcttatgtccaaat

SEQ ID NO: 4889 - RNA, 20 nt, synthetic construct
  misc_feature 1..20: note = spacer sequence
  source 1..20: mol_type = other RNA
aaatttcctcttttgtaagg

SEQ ID NO: 4890 - RNA, 20 nt, synthetic construct
  misc_feature 1..20: note = spacer sequence
  source 1..20: mol_type = other RNA
tcttttgtaaggacaccagt

SEQ ID NO: 4891 - RNA, 20 nt, synthetic construct
  misc_feature 1..20: note = spacer sequence
  source 1..20: mol_type = other RNA
tttgtaaggacaccagtcat

SEQ ID NO: 4892 - RNA, 20 nt, synthetic construct
  misc_feature 1..20: note = spacer sequence
  source 1..20: mol_type = other RNA
ttacaaaagaggaaatttgg

SEQ ID NO: 4893 - RNA, 20 nt, synthetic construct
  misc_feature 1..20: note = spacer sequence
  source 1..20: mol_type = other RNA
tgctggacttaggggttcat

SEQ ID NO: 4894 - RNA, 20 nt, synthetic construct
  misc_feature 1..20: note = spacer sequence
  source 1..20: mol_type = other RNA
agcatgactggtgtccttac

SEQ ID NO: 4895 - RNA, 20 nt, synthetic construct
  misc_feature 1..20: note = spacer sequence
  source 1..20: mol_type = other RNA
tcctactccagtatgacctt

SEQ ID NO: 4896 - RNA, 20 nt, synthetic construct
  misc_feature 1..20: note = spacer sequence
  source 1..20: mol_type = other RNA
tactccagtatgaccttatc

SEQ ID NO: 4897 - RNA, 20 nt, synthetic construct
  misc_feature 1..20: note = spacer sequence
  source 1..20: mol_type = other RNA
agtatgaccttatcttaact

SEQ ID NO: 4898 - RNA, 20 nt, synthetic construct
  misc_feature 1..20: note = spacer sequence
  source 1..20: mol_type = other RNA
tactggagtaggatgaaccc

SEQ ID NO: 4899 - RNA, 20 nt, synthetic construct
  misc_feature 1..20: note = spacer sequence
  source 1..20: mol_type = other RNA
taactaattacatctgcaaa

SEQ ID NO: 4900 - RNA, 20 nt, synthetic construct
  misc_feature 1..20: note = spacer sequence
  source 1..20: mol_type = other RNA
gcaaaaccccatttccaaac

SEQ ID NO: 4901 - RNA, 20 nt, synthetic construct
  misc_feature 1..20: note = spacer sequence
  source 1..20: mol_type = other RNA
aaacatggtcaccttccaag

SEQ ID NO: 4902 - RNA, 20 nt, synthetic construct
  misc_feature 1..20: note = spacer sequence
  source 1..20: mol_type = other RNA
ccttccaagttattgggggt

SEQ ID NO: 4903 - RNA, 20 nt, synthetic construct
  misc_feature 1..20: note = spacer sequence
  source 1..20: mol_type = other RNA
aagttattgggggttaaaac

SEQ ID NO: 4904 - RNA, 20 nt, synthetic construct
  misc_feature 1..20: note = spacer sequence
  source 1..20: mol_type = other RNA
gggctgggcgtggtggctca

SEQ ID NO: 4905 - RNA, 20 nt, synthetic construct
  misc_feature 1..20: note = spacer sequence
  source 1..20: mol_type = other RNA
tgcctgtaatcccagcagtt

SEQ ID NO: 4906 - RNA, 20 nt, synthetic construct
  misc_feature 1..20: note = spacer sequence
  source 1..20: mol_type = other RNA
cagcagtttggaaggccgag

SEQ ID NO: 4907 - RNA, 20 nt, synthetic construct
  misc_feature 1..20: note = spacer sequence
  source 1..20: mol_type = other RNA
aaactgctgggattacaggc

SEQ ID NO: 4908 - RNA, 20 nt, synthetic construct
  misc_feature 1..20: note = spacer sequence
  source 1..20: mol_type = other RNA
gccttccaaactgctgggat

SEQ ID NO: 4909 - RNA, 20 nt, synthetic construct
  misc_feature 1..20: note = spacer sequence
  source 1..20: mol_type = other RNA
gcctgcctcggccttccaaa

SEQ ID NO: 4910 - RNA, 20 nt, synthetic construct
  misc_feature 1..20: note = spacer sequence
  source 1..20: mol_type = other RNA
caaggtcaggagatcgagac

SEQ ID NO: 4911 - RNA, 20 nt, synthetic construct
  misc_feature 1..20: note = spacer sequence
  source 1..20: mol_type = other RNA
ggagatcgagaccatcctgg

SEQ ID NO: 4912 - RNA, 20 nt, synthetic construct
  misc_feature 1..20: note = spacer sequence
  source 1..20: mol_type = other RNA
tgaccttgtgatccgcctgc

SEQ ID NO: 4913 - RNA, 20 nt, synthetic construct
  misc_feature 1..20: note = spacer sequence
  source 1..20: mol_type = other RNA
cctgaccttgtgatccgcct

SEQ ID NO: 4914 - RNA, 20 nt, synthetic construct
  misc_feature 1..20: note = spacer sequence
  source 1..20: mol_type = other RNA
agaccatcctggctaacatg

SEQ ID NO: 4915 - RNA, 20 nt, synthetic construct
  misc_feature 1..20: note = spacer sequence
  source 1..20: mol_type = other RNA
atctcctgaccttgtgatcc

SEQ ID NO: 4916 - RNA, 20 nt, synthetic construct
  misc_feature 1..20: note = spacer sequence
  source 1..20: mol_type = other RNA
cgatctcctgaccttgtgat

SEQ ID NO: 4917 - RNA, 20 nt, synthetic construct
  misc_feature 1..20: note = spacer sequence
  source 1..20: mol_type = other RNA
tggctaacatggtgaaaccc

SEQ ID NO: 4918 - RNA, 20 nt, synthetic construct
  misc_feature 1..20: note = spacer sequence
  source 1..20: mol_type = other RNA
ccatgttagccaggatggtc

SEQ ID NO: 4919 - RNA, 20 nt, synthetic construct
  misc_feature 1..20: note = spacer sequence
  source 1..20: mol_type = other RNA
ctattaaaaatacaaaaaat

SEQ ID NO: 4920 - RNA, 20 nt, synthetic construct
  misc_feature 1..20: note = spacer sequence
  source 1..20: mol_type = other RNA
attaaaaatacaaaaaatta

SEQ ID NO: 4921 - RNA, 20 nt, synthetic construct
  misc_feature 1..20: note = spacer sequence
  source 1..20: mol_type = other RNA
cagctacttgggaggctgag

SEQ ID NO: 4922 - RNA, 20 nt, synthetic construct
  misc_feature 1..20: note = spacer sequence
  source 1..20: mol_type = other RNA
caagtagctgggatgcccgc

SEQ ID NO: 4923 - RNA, 20 nt, synthetic construct
  misc_feature 1..20: note = spacer sequence
  source 1..20: mol_type = other RNA
gcctcccaagtagctgggat

SEQ ID NO: 4924 - RNA, 20 nt, synthetic construct
  misc_feature 1..20: note = spacer sequence
  source 1..20: mol_type = other RNA
tgcctcagcctcccaagtag

SEQ ID NO: 4925 - RNA, 20 nt, synthetic construct
  misc_feature 1..20: note = spacer sequence
  source 1..20: mol_type = other RNA
cctgcctcagcctcccaagt

SEQ ID NO: 4926 - RNA, 20 nt, synthetic construct
  misc_feature 1..20: note = spacer sequence
  source 1..20: mol_type = other RNA
tgccattctcctgcctcagc

SEQ ID NO: 4927 - RNA, 20 nt, synthetic construct
  misc_feature 1..20: note = spacer sequence
  source 1..20: mol_type = other RNA
caggttcatgccattctcct

SEQ ID NO: 4928 - RNA, 20 nt, synthetic construct
  misc_feature 1..20: note = spacer sequence
  source 1..20: mol_type = other RNA
gcctcccaggttcatgccat

SEQ ID NO: 4929 - RNA, 20 nt, synthetic construct
  misc_feature 1..20: note = spacer sequence
  source 1..20: mol_type = other RNA
ctgcaagctctgcctcccag

SEQ ID NO: 4930 - RNA, 20 nt, synthetic construct
  misc_feature 1..20: note = spacer sequence
  source 1..20: mol_type = other RNA
gctcactgcaagctctgcct

SEQ ID NO: 4931 - RNA, 20 nt, synthetic construct
  misc_feature 1..20: note = spacer sequence
  source 1..20: mol_type = other RNA
cggctcactgcaagctctgc

SEQ ID NO: 4932 - RNA, 20 nt, synthetic construct
  misc_feature 1..20: note = spacer sequence
  source 1..20: mol_type = other RNA
cgccactgcactccagcctg

SEQ ID NO: 4933 - RNA, 20 nt, synthetic construct
  misc_feature 1..20: note = spacer sequence
  source 1..20: mol_type = other RNA
agcctgggtgacagagcgag

SEQ ID NO: 4934 - RNA, 20 nt, synthetic construct
  misc_feature 1..20: note = spacer sequence
  source 1..20: mol_type = other RNA
cccaggctggagtgcagtgg

SEQ ID NO: 4935 - RNA, 20 nt, synthetic construct
  misc_feature 1..20: note = spacer sequence
  source 1..20: mol_type = other RNA
gtcacccaggctggagtgca

SEQ ID NO: 4936 - RNA, 20 nt, synthetic construct
  misc_feature 1..20: note = spacer sequence
  source 1..20: mol_type = other RNA
ctctgtcacccaggctggag

SEQ ID NO: 4937 - RNA, 20 nt, synthetic construct
  misc_feature 1..20: note = spacer sequence
  source 1..20: mol_type = other RNA
cgctctgtcacccaggctgg

SEQ ID NO: 4938 - RNA, 20 nt, synthetic construct
  misc_feature 1..20: note = spacer sequence
  source 1..20: mol_type = other RNA
gtccaaaaaaataaaacttt

SEQ ID NO: 4939 - RNA, 20 nt, synthetic construct
  misc_feature 1..20: note = spacer sequence
  source 1..20: mol_type = other RNA
aaaaaaataaaactttaaca

SEQ ID NO: 4940 - RNA, 20 nt, synthetic construct
  misc_feature 1..20: note = spacer sequence
  source 1..20: mol_type = other RNA
ccaaatacatatgttaaagt

SEQ ID NO: 4941 - RNA, 20 nt, synthetic construct
  misc_feature 1..20: note = spacer sequence
  source 1..20: mol_type = other RNA
acccataatacatccaaatg

SEQ ID NO: 4942 - RNA, 20 nt, synthetic construct
  misc_feature 1..20: note = spacer sequence
  source 1..20: mol_type = other RNA
aaatgtccctcagcttatga

SEQ ID NO: 4943 - RNA, 20 nt, synthetic construct
  misc_feature 1..20: note = spacer sequence
  source 1..20: mol_type = other RNA
ctcagcttatgagcggaaaa

SEQ ID NO: 4944 - RNA, 20 nt, synthetic construct
  misc_feature 1..20: note = spacer sequence
  source 1..20: mol_type = other RNA
gcttatgagcggaaaaacga

SEQ ID NO: 4945 - RNA, 20 nt, synthetic construct
  misc_feature 1..20: note = spacer sequence
  source 1..20: mol_type = other RNA
taagctgagggacatttgga

SEQ ID NO: 4946 - RNA, 20 nt, synthetic construct
  misc_feature 1..20: note = spacer sequence
  source 1..20: mol_type = other RNA
gctcataagctgagggacat

SEQ ID NO: 4947 - RNA, 20 nt, synthetic construct
  misc_feature 1..20: note = spacer sequence
  source 1..20: mol_type = other RNA
tttttccgctcataagctga

SEQ ID NO: 4948 - RNA, 20 nt, synthetic construct
  misc_feature 1..20: note = spacer sequence
  source 1..20: mol_type = other RNA
cagatacagtctatccatgt

SEQ ID NO: 4949 - RNA, 20 nt, synthetic construct
  misc_feature 1..20: note = spacer sequence
  source 1..20: mol_type = other RNA
gatacagtctatccatgtaa

SEQ ID NO: 4950 - RNA, 20 nt, synthetic construct
  misc_feature 1..20: note = spacer sequence
  source 1..20: mol_type = other RNA
gagatcgtttttccgctcat

SEQ ID NO: 4951 - RNA, 20 nt, synthetic construct
  misc_feature 1..20: note = spacer sequence
  source 1..20: mol_type = other RNA
atccatgtaacagaatagta

SEQ ID NO: 4952 - RNA, 20 nt, synthetic construct
  misc_feature 1..20: note = spacer sequence
  source 1..20: mol_type = other RNA
atgtaacagaatagtattca

SEQ ID NO: 4953 - RNA, 20 nt, synthetic construct
  misc_feature 1..20: note = spacer sequence
  source 1..20: mol_type = other RNA
gttacatggatagactgtat

SEQ ID NO: 4954 - RNA, 20 nt, synthetic construct
  misc_feature 1..20: note = spacer sequence
  source 1..20: mol_type = other RNA
catatagaaaggcacaaatt

SEQ ID NO: 4955 - RNA, 20 nt, synthetic construct
  misc_feature 1..20: note = spacer sequence
  source 1..20: mol_type = other RNA
atatgtgaatactattctgt

SEQ ID NO: 4956 - RNA, 20 nt, synthetic construct
  misc_feature 1..20: note = spacer sequence
  source 1..20: mol_type = other RNA
gtaatttgtgcctttctata

SEQ ID NO: 4957 - RNA, 20 nt, synthetic construct
  misc_feature 1..20: note = spacer sequence
  source 1..20: mol_type = other RNA
cgttatagcacttatctgta

SEQ ID NO: 4958 - RNA, 20 nt, synthetic construct
  misc_feature 1..20: note = spacer sequence
  source 1..20: mol_type = other RNA
gttcacgttatagcacttat

SEQ ID NO: 4959 - RNA, 20 nt, synthetic construct
  misc_feature 1..20: note = spacer sequence
  source 1..20: mol_type = other RNA
aaaacatcatgctaagtaca

SEQ ID NO: 4960 - RNA, 20 nt, synthetic construct
  misc_feature 1..20: note = spacer sequence
  source 1..20: mol_type = other RNA
tgctaagtacaataggccag

SEQ ID NO: 4961 - RNA, 20 nt, synthetic construct
  misc_feature 1..20: note = spacer sequence
  source 1..20: mol_type = other RNA
ggcctattgtacttagcatg

SEQ ID NO: 4962 - RNA, 20 nt, synthetic construct
  misc_feature 1..20: note = spacer sequence
  source 1..20: mol_type = other RNA
tttgcatctggcctattgta

SEQ ID NO: 4963 - RNA, 20 nt, synthetic construct
  misc_feature 1..20: note = spacer sequence
  source 1..20: mol_type = other RNA
tacaatacactgtcttttgc

SEQ ID NO: 4964 - RNA, 20 nt, synthetic construct
  misc_feature 1..20: note = spacer sequence
  source 1..20: mol_type = other RNA
tgtaaatagtatcatacaat

SEQ ID NO: 4965 - RNA, 20 nt, synthetic construct
  misc_feature 1..20: note = spacer sequence
  source 1..20: mol_type = other RNA
agaaagggcaaatttattga

SEQ ID NO: 4966 - RNA, 20 nt, synthetic construct
  misc_feature 1..20: note = spacer sequence
  source 1..20: mol_type = other RNA
ggacatttcatgtaaatagt

SEQ ID NO: 4967 - RNA, 20 nt, synthetic construct
  misc_feature 1..20: note = spacer sequence
  source 1..20: mol_type = other RNA
ataaatttgccctttctgga

SEQ ID NO: 4968 - RNA, 20 nt, synthetic construct
  misc_feature 1..20: note = spacer sequence
  source 1..20: mol_type = other RNA
gtcaataaatttgccctttc

SEQ ID NO: 4969 - RNA, 20 nt, synthetic construct
  misc_feature 1..20: note = spacer sequence
  source 1..20: mol_type = other RNA
gtggttgcctgcagcttggg

SEQ ID NO: 4970 - RNA, 20 nt, synthetic construct
  misc_feature 1..20: note = spacer sequence
  source 1..20: mol_type = other RNA
caccccaagctgcaggcaac

SEQ ID NO: 4971 - RNA, 20 nt, synthetic construct
  misc_feature 1..20: note = spacer sequence
  source 1..20: mol_type = other RNA
cccaccccaagctgcaggca

SEQ ID NO: 4972 - RNA, 20 nt, synthetic construct
  misc_feature 1..20: note = spacer sequence
  source 1..20: mol_type = other RNA
cttctcccaccccaagctgc

SEQ ID NO: 4973 - RNA, 20 nt, synthetic construct
  misc_feature 1..20: note = spacer sequence
  source 1..20: mol_type = other RNA
tggtagtttttgcttaatcc

SEQ ID NO: 4974 - RNA, 20 nt, synthetic construct
  misc_feature 1..20: note = spacer sequence
  source 1..20: mol_type = other RNA
gcccaatttacctcatggta

SEQ ID NO: 4975 - RNA, 20 nt, synthetic construct
  misc_feature 1..20: note = spacer sequence
  source 1..20: mol_type = other RNA
atcagcccaatttacctcat

SEQ ID NO: 4976 - RNA, 20 nt, synthetic construct
  misc_feature 1..20: note = spacer sequence
  source 1..20: mol_type = other RNA
actacataaatttactttaa

SEQ ID NO: 4977 - RNA, 20 nt, synthetic construct
  misc_feature 1..20: note = spacer sequence
  source 1..20: mol_type = other RNA
ttaaagtgcatgcttacaaa

SEQ ID NO: 4978 - RNA, 20 nt, synthetic construct
  misc_feature 1..20: note = spacer sequence
  source 1..20: mol_type = other RNA
ccctttgtaagcatgcactt

SEQ ID NO: 4979 - RNA, 20 nt, synthetic construct
  misc_feature 1..20: note = spacer sequence
  source 1..20: mol_type = other RNA
taataaaactgttaaaaaaa

SEQ ID NO: 4980 - RNA, 20 nt, synthetic construct
  misc_feature 1..20: note = spacer sequence
  source 1..20: mol_type = other RNA
caggttgtggagcagcaatt

SEQ ID NO: 4981 - RNA, 20 nt, synthetic construct
  misc_feature 1..20: note = spacer sequence
  source 1..20: mol_type = other RNA
acaacctgggaggtttggtt

SEQ ID NO: 4982 - RNA, 20 nt, synthetic construct
  misc_feature 1..20: note = spacer sequence
  source 1..20: mol_type = other RNA
tttaaaaaaaattgctgctc

SEQ ID NO: 4983 - RNA, 20 nt, synthetic construct
  misc_feature 1..20: note = spacer sequence
  source 1..20: mol_type = other RNA
tttttttttttttttttttt

SEQ ID NO: 4984 - RNA, 20 nt, synthetic construct
  misc_feature 1..20: note = spacer sequence
  source 1..20: mol_type = other RNA
cactctgttgcccaggctgg

SEQ ID NO: 4985 - RNA, 20 nt, synthetic construct
  misc_feature 1..20: note = spacer sequence
  source 1..20: mol_type = other RNA
ctctgttgcccaggctggag

SEQ ID NO: 4986 - RNA, 20 nt, synthetic construct
  misc_feature 1..20: note = spacer sequence
  source 1..20: mol_type = other RNA
gttgcccaggctggagtgca

SEQ ID NO: 4987 - RNA, 20 nt, synthetic construct
  misc_feature 1..20: note = spacer sequence
  source 1..20: mol_type = other RNA
agcctgggcaacagagtgag

SEQ ID NO: 4988 - RNA, 20 nt, synthetic construct
  misc_feature 1..20: note = spacer sequence
  source 1..20: mol_type = other RNA
gcactccagcctgggcaaca

SEQ ID NO: 4989 - RNA, 20 nt, synthetic construct
  misc_feature 1..20: note = spacer sequence
  source 1..20: mol_type = other RNA
cacctctgcactccagcctg

SEQ ID NO: 4990 - RNA, 20 nt, synthetic construct
  misc_feature 1..20: note = spacer sequence
  source 1..20: mol_type = other RNA
ctgctcactgcaacctctgc

SEQ ID NO: 4991 - RNA, 20 nt, synthetic construct
  misc_feature 1..20: note = spacer sequence
  source 1..20: mol_type = other RNA
gctcactgcaacctctgcca

SEQ ID NO: 4992 - RNA, 20 nt, synthetic construct
  misc_feature 1..20: note = spacer sequence
  source 1..20: mol_type = other RNA
ctgcaacctctgccacctga

SEQ ID NO: 4993 - RNA, 20 nt, synthetic construct
  misc_feature 1..20: note = spacer sequence
  source 1..20: mol_type = other RNA
gccacctgagttcaagcaat

SEQ ID NO: 4994 - RNA, 20 nt, synthetic construct
  misc_feature 1..20: note = spacer sequence
  source 1..20: mol_type = other RNA
ggtggcagaggttgcagtga

SEQ ID NO: 4995 - RNA, 20 nt, synthetic construct
  misc_feature 1..20: note = spacer sequence
  source 1..20: mol_type = other RNA
agcaattctgccacctcagt

SEQ ID NO: 4996 - RNA, 20 nt, synthetic construct
  misc_feature 1..20: note = spacer sequence
  source 1..20: mol_type = other RNA
gccacctcagtctcctgggt

SEQ ID NO: 4997 - RNA, 20 nt, synthetic construct
  misc_feature 1..20: note = spacer sequence
  source 1..20: mol_type = other RNA
gtctcctgggtagctgagac

SEQ ID NO: 4998 - RNA, 20 nt, synthetic construct
  misc_feature 1..20: note = spacer sequence
  source 1..20: mol_type = other RNA
cctgggtagctgagactata

SEQ ID NO: 4999 - RNA, 20 nt, synthetic construct
  misc_feature 1..20: note = spacer sequence
  source 1..20: mol_type = other RNA
tgggtagctgagactatagg

SEQ ID NO: 5000 - RNA, 20 nt, synthetic construct
  misc_feature 1..20: note = spacer sequence
  source 1..20: mol_type = other RNA
gctacccaggagactgaggt

SEQ ID NO: 5001 - RNA, 20 nt, synthetic construct
  misc_feature 1..20: note = spacer sequence
  source 1..20: mol_type = other RNA
cagctacccaggagactgag

SEQ ID NO: 5002 - RNA, 20 nt, synthetic construct
  misc_feature 1..20: note = spacer sequence
  source 1..20: mol_type = other RNA
acaaaaaatacaaaaactag

SEQ ID NO: 5003 - RNA, 20 nt, synthetic construct
  misc_feature 1..20: note = spacer sequence
  source 1..20: mol_type = other RNA
gggtttcaccatgttgccca

SEQ ID NO: 5004 - RNA, 20 nt, synthetic construct
  misc_feature 1..20: note = spacer sequence
  source 1..20: mol_type = other RNA
ccatgttgcccaggctggtc

SEQ ID NO: 5005 - RNA, 20 nt, synthetic construct
  misc_feature 1..20: note = spacer sequence
  source 1..20: mol_type = other RNA
caaactcctgggctgaagtg

SEQ ID NO: 5006 - RNA, 20 nt, synthetic construct
  misc_feature 1..20: note = spacer sequence
  source 1..20: mol_type = other RNA
aactcctgggctgaagtgat

SEQ ID NO: 5007 - RNA, 20 nt, synthetic construct
  misc_feature 1..20: note = spacer sequence
  source 1..20: mol_type = other RNA
tgggctgaagtgatctgccc

SEQ ID NO: 5008 - RNA, 20 nt, synthetic construct
  misc_feature 1..20: note = spacer sequence
  source 1..20: mol_type = other RNA
gcccaggagtttgagaccag

SEQ ID NO: 5009 - RNA, 20 nt, synthetic construct
  misc_feature 1..20: note = spacer sequence
  source 1..20: mol_type = other RNA
cttcagcccaggagtttgag

SEQ ID NO: 5010 - RNA, 20 nt, synthetic construct
  misc_feature 1..20: note = spacer sequence
  source 1..20: mol_type = other RNA
gcccgtctccgcctccaaaa

SEQ ID NO: 5011 - RNA, 20 nt, synthetic construct
  misc_feature 1..20: note = spacer sequence
  source 1..20: mol_type = other RNA
ccgcctccaaaagtgctggg

SEQ ID NO: 5012 - RNA, 20 nt, synthetic construct
  misc_feature 1..20: note = spacer sequence
  source 1..20: mol_type = other RNA
gcctccaaaagtgctgggat

SEQ ID NO: 5013 - RNA, 20 nt, synthetic construct
  misc_feature 1..20: note = spacer sequence
  source 1..20: mol_type = other RNA
aaaagtgctgggattatagg

SEQ ID NO: 5014 - RNA, 20 nt, synthetic construct
  misc_feature 1..20: note = spacer sequence
  source 1..20: mol_type = other RNA
cagcacttttggaggcggag

SEQ ID NO: 5015 - RNA, 20 nt, synthetic construct
  misc_feature 1..20: note = spacer sequence
  source 1..20: mol_type = other RNA
accctataatcccagcactt

SEQ ID NO: 5016 - RNA, 20 nt, synthetic construct
  misc_feature 1..20: note = spacer sequence
  source 1..20: mol_type = other RNA
ttaaaaacagaaagaagttg

SEQ ID NO: 5017 - RNA, 20 nt, synthetic construct
  misc_feature 1..20: note = spacer sequence
  source 1..20: mol_type = other RNA
gtttttaaggaaaggggctg

SEQ ID NO: 5018 - RNA, 20 nt, synthetic construct
  misc_feature 1..20: note = spacer sequence
  source 1..20: mol_type = other RNA
ttctgtttttaaggaaaggg

SEQ ID NO: 5019 - RNA, 20 nt, synthetic construct
  misc_feature 1..20: note = spacer sequence
  source 1..20: mol_type = other RNA
caacttctttctgtttttaa

SEQ ID NO: 5020 - RNA, 20 nt, synthetic construct
  misc_feature 1..20: note = spacer sequence
  source 1..20: mol_type = other RNA
gcttcacaacttctttctgt

SEQ ID NO: 5021 - RNA, 20 nt, synthetic construct
  misc_feature 1..20: note = spacer sequence
  source 1..20: mol_type = other RNA
tcctgtcatgataaaggtat

SEQ ID NO: 5022 - RNA, 20 nt, synthetic construct
  misc_feature 1..20: note = spacer sequence
  source 1..20: mol_type = other RNA
tgtcatgataaaggtatgac

SEQ ID NO: 5023 - RNA, 20 nt, synthetic construct
  misc_feature 1..20: note = spacer sequence
  source 1..20: mol_type = other RNA
tgataaaggtatgactaaat

SEQ ID NO: 5024 - RNA, 20 nt, synthetic construct
  misc_feature 1..20: note = spacer sequence
  source 1..20: mol_type = other RNA
tgacaggatgattctgcttc

SEQ ID NO: 5025 - RNA, 20 nt, synthetic construct
  misc_feature 1..20: note = spacer sequence
  source 1..20: mol_type = other RNA
tacctttatcatgacaggat

SEQ ID NO: 5026 - RNA, 20 nt, synthetic construct
  misc_feature 1..20: note = spacer sequence
  source 1..20: mol_type = other RNA
cgtattatttagtcatacct

SEQ ID NO: 5027 - RNA, 20 nt, synthetic construct
  misc_feature 1..20: note = spacer sequence
  source 1..20: mol_type = other RNA
attaactcttcacaagtgta

SEQ ID NO: 5028 - RNA, 20 nt, synthetic construct
  misc_feature 1..20: note = spacer sequence
  source 1..20: mol_type = other RNA
tcacaagtgtaatgatctca

SEQ ID NO: 5029 - RNA, 20 nt, synthetic construct
  misc_feature 1..20: note = spacer sequence
  source 1..20: mol_type = other RNA
caagtgtaatgatctcaaac

SEQ ID NO: 5030 - RNA, 20 nt, synthetic construct
  misc_feature 1..20: note = spacer sequence
  source 1..20: mol_type = other RNA
ttacacttgtgaagagttaa

SEQ ID NO: 5031 - RNA, 20 nt, synthetic construct
  misc_feature 1..20: note = spacer sequence
  source 1..20: mol_type = other RNA
caaacaaaatatactaccct

SEQ ID NO: 5032 - RNA, 20 nt, synthetic construct
  misc_feature 1..20: note = spacer sequence
  source 1..20: mol_type = other RNA
aacaaaatatactacccttc

SEQ ID NO: 5033 - RNA, 20 nt, synthetic construct
  misc_feature 1..20: note = spacer sequence
  source 1..20: mol_type = other RNA
tctcaacttaaataccaatc

SEQ ID NO: 5034 - RNA, 20 nt, synthetic construct
  misc_feature 1..20: note = spacer sequence
  source 1..20: mol_type = other RNA
caacttaaataccaatcttc

SEQ ID NO: 5035 - RNA, 20 nt, synthetic construct
  misc_feature 1..20: note = spacer sequence
  source 1..20: mol_type = other RNA
acttaaataccaatcttcat

SEQ ID NO: 5036 - RNA, 20 nt, synthetic construct
  misc_feature 1..20: note = spacer sequence
  source 1..20: mol_type = other RNA
tcatgcaataagtaaaatct

SEQ ID NO: 5037 - RNA, 20 nt, synthetic construct
  misc_feature 1..20: note = spacer sequence
  source 1..20: mol_type = other RNA
tgcaataagtaaaatctgca

SEQ ID NO: 5038 - RNA, 20 nt, synthetic construct
  misc_feature 1..20: note = spacer sequence
  source 1..20: mol_type = other RNA
gcactgatgagacttttaaa

SEQ ID NO: 5039 - RNA, 20 nt, synthetic construct
  misc_feature 1..20: note = spacer sequence
  source 1..20: mol_type = other RNA
gtgcagattttacttattgc

SEQ ID NO: 5040 - RNA, 20 nt, synthetic construct
  misc_feature 1..20: note = spacer sequence
  source 1..20: mol_type = other RNA
tcagtgcagattttacttat

SEQ ID NO: 5041 - RNA, 20 nt, synthetic construct
  misc_feature 1..20: note = spacer sequence
  source 1..20: mol_type = other RNA
catcagtgcagattttactt

SEQ ID NO: 5042 - RNA, 20 nt, synthetic construct
  misc_feature 1..20: note = spacer sequence
  source 1..20: mol_type = other RNA
tatgtggtggggctgctgtt

SEQ ID NO: 5043 - RNA, 20 nt, synthetic construct
  misc_feature 1..20: note = spacer sequence
  source 1..20: mol_type = other RNA
aacccgcagcctatggtgcc

SEQ ID NO: 5044 - RNA, 20 nt, synthetic construct
  misc_feature 1..20: note = spacer sequence
  source 1..20: mol_type = other RNA
tgggccacaggcaccatagg

SEQ ID NO: 5045 - RNA, 20 nt, synthetic construct
  misc_feature 1..20: note = spacer sequence
  source 1..20: mol_type = other RNA
taaactttcttaaaatgtga

SEQ ID NO: 5046 - RNA, 20 nt, synthetic construct
  misc_feature 1..20: note = spacer sequence
  source 1..20: mol_type = other RNA
taaaatgtgagattgccttt

SEQ ID NO: 5047 - RNA, 20 nt, synthetic construct
  misc_feature 1..20: note = spacer sequence
  source 1..20: mol_type = other RNA
cattttaagaaagtttatga

SEQ ID NO: 5048 - RNA, 20 nt, synthetic construct
  misc_feature 1..20: note = spacer sequence
  source 1..20: mol_type = other RNA
cacattttaagaaagtttat

SEQ ID NO: 5049 - RNA, 20 nt, synthetic construct
  misc_feature 1..20: note = spacer sequence
  source 1..20: mol_type = other RNA
caaaggcaatctcacatttt

SEQ ID NO: 5050 - RNA, 20 nt, synthetic construct
  misc_feature 1..20: note = spacer sequence
  source 1..20: mol_type = other RNA
ccagctatcattagtgttaa

SEQ ID NO: 5051 - RNA, 20 nt, synthetic construct
  misc_feature 1..20: note = spacer sequence
  source 1..20: mol_type = other RNA
ttagtgttaacgtattttat

SEQ ID NO: 5052 - RNA, 20 nt, synthetic construct
  misc_feature 1..20: note = spacer sequence
  source 1..20: mol_type = other RNA
tgggccacacataaaatacg

SEQ ID NO: 5053 - RNA, 20 nt, synthetic construct
  misc_feature 1..20: note = spacer sequence
  source 1..20: mol_type = other RNA
tcaaatatagccaatttgaa

SEQ ID NO: 5054 - RNA, 20 nt, synthetic construct
  misc_feature 1..20: note = spacer sequence
  source 1..20: mol_type = other RNA
aatatagccaatttgaagcc

SEQ ID NO: 5055 - RNA, 20 nt, synthetic construct
  misc_feature 1..20: note = spacer sequence
  source 1..20: mol_type = other RNA
aattggctatatttgaagaa

SEQ ID NO: 5056 - RNA, 20 nt, synthetic construct
  misc_feature 1..20: note = spacer sequence
  source 1..20: mol_type = other RNA
cctgggccatattggcttca

SEQ ID NO: 5057 - RNA, 20 nt, synthetic construct
  misc_feature 1..20: note = spacer sequence
  source 1..20: mol_type = other RNA
ccatcacctgggccatattg

SEQ ID NO: 5058 - RNA, 20 nt, synthetic construct
  misc_feature 1..20: note = spacer sequence
  source 1..20: mol_type = other RNA
tttcaagtttaagtctcacc

SEQ ID NO: 5059 - RNA, 20 nt, synthetic construct
  misc_feature 1..20: note = spacer sequence
  source 1..20: mol_type = other RNA
agtttaagtctcacccaact

SEQ ID NO: 5060 - RNA, 20 nt, synthetic construct
  misc_feature 1..20: note = spacer sequence
  source 1..20: mol_type = other RNA
cacccaactcctacccacct

SEQ ID NO: 5061 - RNA, 20 nt, synthetic construct
  misc_feature 1..20: note = spacer sequence
  source 1..20: mol_type = other RNA
cccaactcctacccacctag

SEQ ID NO: 5062 - RNA, 20 nt, synthetic construct
  misc_feature 1..20: note = spacer sequence
  source 1..20: mol_type = other RNA
tacccacctagtagggtaga

SEQ ID NO: 5063 - RNA, 20 nt, synthetic construct
  misc_feature 1..20: note = spacer sequence
  source 1..20: mol_type = other RNA
accctactaggtgggtagga

SEQ ID NO: 5064 - RNA, 20 nt, synthetic construct
  misc_feature 1..20: note = spacer sequence
  source 1..20: mol_type = other RNA
ttaagaaaattatgtgcctt

SEQ ID NO: 5065 - RNA, 20 nt, synthetic construct
  misc_feature 1..20: note = spacer sequence
  source 1..20: mol_type = other RNA
taatgaacctctaccctact

SEQ ID NO: 5066 - RNA, 20 nt, synthetic construct
  misc_feature 1..20: note = spacer sequence
  source 1..20: mol_type = other RNA
ctttaaggcacataattttc

SEQ ID NO: 5067 - RNA, 20 nt, synthetic construct
  misc_feature 1..20: note = spacer sequence
  source 1..20: mol_type = other RNA
attccctttaaggcacataa

SEQ ID NO: 5068 - RNA, 20 nt, synthetic construct
  misc_feature 1..20: note = spacer sequence
  source 1..20: mol_type = other RNA
aagttgttttttaaaaatgt

SEQ ID NO: 5069 - RNA, 20 nt, synthetic construct
  misc_feature 1..20: note = spacer sequence
  source 1..20: mol_type = other RNA
tgcctataatcctagcactt

SEQ ID NO: 5070 - RNA, 20 nt, synthetic construct
  misc_feature 1..20: note = spacer sequence
  source 1..20: mol_type = other RNA
tagcacttggggaggctgag

SEQ ID NO: 5071 - RNA, 20 nt, synthetic construct
  misc_feature 1..20: note = spacer sequence
  source 1..20: mol_type = other RNA
ccaagtgctaggattatagg

SEQ ID NO: 5072 - RNA, 20 nt, synthetic construct
  misc_feature 1..20: note = spacer sequence
  source 1..20: mol_type = other RNA
gcctccccaagtgctaggat

SEQ ID NO: 5073 - RNA, 20 nt, synthetic construct
  misc_feature 1..20: note = spacer sequence
  source 1..20: mol_type = other RNA
acctgcctcagcctccccaa

SEQ ID NO: 5074 - RNA, 20 nt, synthetic construct
  misc_feature 1..20: note = spacer sequence
  source 1..20: mol_type = other RNA
agcaatccacctgcctcagc

SEQ ID NO: 5075 - RNA, 20 nt, synthetic construct
  misc_feature 1..20: note = spacer sequence
  source 1..20: mol_type = other RNA
tgggctcaagcaatccacct

SEQ ID NO: 5076 - RNA, 20 nt, synthetic construct
  misc_feature 1..20: note = spacer sequence
  source 1..20: mol_type = other RNA
aaatgagcttgggcaacata

SEQ ID NO: 5077 - RNA, 20 nt, synthetic construct
  misc_feature 1..20: note = spacer sequence
  source 1..20: mol_type = other RNA
tttagaactcctgggctcaa

SEQ ID NO: 5078 - RNA, 20 nt, synthetic construct
  misc_feature 1..20: note = spacer sequence
  source 1..20: mol_type = other RNA
ctatgttgcccaagctcatt

SEQ ID NO: 5079 - RNA, 20 nt, synthetic construct
  misc_feature 1..20: note = spacer sequence
  source 1..20: mol_type = other RNA
ccctatgttgcccaagctca

SEQ ID NO: 5080 - RNA, 20 nt, synthetic construct
  misc_feature 1..20: note = spacer sequence
  source 1..20: mol_type = other RNA
ctaccaaaaaataaaaaaaa

SEQ ID NO: 5081 - RNA, 20 nt, synthetic construct
  misc_feature 1..20: note = spacer sequence
  source 1..20: mol_type = other RNA
accaaaaaataaaaaaaaaa

SEQ ID NO: 5082 - RNA, 20 nt, synthetic construct
  misc_feature 1..20: note = spacer sequence
  source 1..20: mol_type = other RNA
cctgtagtcccagtgagagg

SEQ ID NO: 5083 - RNA, 20 nt, synthetic construct
  misc_feature 1..20: note = spacer sequence
  source 1..20: mol_type = other RNA
cagtgagaggtgacagcatg

SEQ ID NO: 5084 - RNA, 20 nt, synthetic construct
  misc_feature 1..20: note = spacer sequence
  source 1..20: mol_type = other RNA
ctgggactacaggtgagcac

SEQ ID NO: 5085 - RNA, 20 nt, synthetic construct
  misc_feature 1..20: note = spacer sequence
  source 1..20: mol_type = other RNA
cactgggactacaggtgagc

SEQ ID NO: 5086 - RNA, 20 nt, synthetic construct
  misc_feature 1..20: note = spacer sequence
  source 1..20: mol_type = other RNA
cctctcactgggactacagg

SEQ ID NO: 5087 - RNA, 20 nt, synthetic construct
  misc_feature 1..20: note = spacer sequence
  source 1..20: mol_type = other RNA
tcagaggcctcactcgctct

SEQ ID NO: 5088 - RNA, 20 nt, synthetic construct
  misc_feature 1..20: note = spacer sequence
  source 1..20: mol_type = other RNA
gaggcctcactcgctctcgg

SEQ ID NO: 5089 - RNA, 20 nt, synthetic construct
  misc_feature 1..20: note = spacer sequence
  source 1..20: mol_type = other RNA
gaggactgccagcatgctgt

SEQ ID NO: 5090 - RNA, 20 nt, synthetic construct
  misc_feature 1..20: note = spacer sequence
  source 1..20: mol_type = other RNA
ctcgctctcggcacctcctc

SEQ ID NO: 5091 - RNA, 20 nt, synthetic construct
  misc_feature 1..20: note = spacer sequence
  source 1..20: mol_type = other RNA
ctctcggcacctcctctgcc

SEQ ID NO: 5092 - RNA, 20 nt, synthetic construct
  misc_feature 1..20: note = spacer sequence
  source 1..20: mol_type = other RNA
cggcacctcctctgcctggg

SEQ ID NO: 5093 - RNA, 20 nt, synthetic construct
  misc_feature 1..20: note = spacer sequence
  source 1..20: mol_type = other RNA
gcacctcctctgcctgggct

SEQ ID NO: 5094 - RNA, 20 nt, synthetic construct
  misc_feature 1..20: note = spacer sequence
  source 1..20: mol_type = other RNA
tctgcctgggctcccacttt

SEQ ID NO: 5095 - RNA, 20 nt, synthetic construct
  misc_feature 1..20: note = spacer sequence
  source 1..20: mol_type = other RNA
gcctgggctcccactttggc

SEQ ID NO: 5096 - RNA, 20 nt, synthetic construct
  misc_feature 1..20: note = spacer sequence
  source 1..20: mol_type = other RNA
cactttggcagcacttgagg

SEQ ID NO: 5097 - RNA, 20 nt, synthetic construct
  misc_feature 1..20: note = spacer sequence
  source 1..20: mol_type = other RNA
agtgctgccaaagtgggagc

SEQ ID NO: 5098 - RNA, 20 nt, synthetic construct
  misc_feature 1..20: note = spacer sequence
  source 1..20: mol_type = other RNA
tcaagtgctgccaaagtggg

SEQ ID NO: 5099 - RNA, 20 nt, synthetic construct
  misc_feature 1..20: note = spacer sequence
  source 1..20: mol_type = other RNA
gcccaccgctgcactgtggg

SEQ ID NO: 5100 - RNA, 20 nt, synthetic construct
  misc_feature 1..20: note = spacer sequence
  source 1..20: mol_type = other RNA
cacagtgcagcggtgggctg

SEQ ID NO: 5101 - RNA, 20 nt, synthetic construct
  misc_feature 1..20: note = spacer sequence
  source 1..20: mol_type = other RNA
gggctggccaaggccggagc

SEQ ID NO: 5102 - RNA, 20 nt, synthetic construct
  misc_feature 1..20: note = spacer sequence
  source 1..20: mol_type = other RNA
ggccttggccagcccagaaa

SEQ ID NO: 5103 - RNA, 20 nt, synthetic construct
  misc_feature 1..20: note = spacer sequence
  source 1..20: mol_type = other RNA
ctcagcttgcaaggaggtgt

SEQ ID NO: 5104 - RNA, 20 nt, synthetic construct
  misc_feature 1..20: note = spacer sequence
  source 1..20: mol_type = other RNA
gcttgcaaggaggtgtggag

SEQ ID NO: 5105 - RNA, 20 nt, synthetic construct
  misc_feature 1..20: note = spacer sequence
  source 1..20: mol_type = other RNA
ttgcaagctgagggagccag

SEQ ID NO: 5106 - RNA, 20 nt, synthetic construct
  misc_feature 1..20: note = spacer sequence
  source 1..20: mol_type = other RNA
acacctccttgcaagctgag

SEQ ID NO: 5107 - RNA, 20 nt, synthetic construct
  misc_feature 1..20: note = spacer sequence
  source 1..20: mol_type = other RNA
ctccacacctccttgcaagc

SEQ ID NO: 5108 - RNA, 20 nt, synthetic construct
  misc_feature 1..20: note = spacer sequence
  source 1..20: mol_type = other RNA
ccctccacacctccttgcaa

SEQ ID NO: 5109 - RNA, 20 nt, synthetic construct
  misc_feature 1..20: note = spacer sequence
  source 1..20: mol_type = other RNA
tgcctctccctccacacctc

SEQ ID NO: 5110 - RNA, 20 nt, synthetic construct
  misc_feature 1..20: note = spacer sequence
  source 1..20: mol_type = other RNA
cgctcatgcctctccctcca

SEQ ID NO: 5111 - RNA, 20 nt, synthetic construct
  misc_feature 1..20: note = spacer sequence
  source 1..20: mol_type = other RNA
gggccagctggagctccagg

SEQ ID NO: 5112 - RNA, 20 nt, synthetic construct
  misc_feature 1..20: note = spacer sequence
  source 1..20: mol_type = other RNA
agctggcccggaagtgcccg

SEQ ID NO: 5113 - RNA, 20 nt, synthetic construct
  misc_feature 1..20: note = spacer sequence
  source 1..20: mol_type = other RNA
aggtgtgcgtgggcttggcg

SEQ ID NO: 5114 - RNA, 20 nt, synthetic construct
  misc_feature 1..20: note = spacer sequence
  source 1..20: mol_type = other RNA
gagcagccggcaggccctgc

SEQ ID NO: 5115 - RNA, 20 nt, synthetic construct
  misc_feature 1..20: note = spacer sequence
  source 1..20: mol_type = other RNA
gagtgcgggcccgccaagcc

SEQ ID NO: 5116 - RNA, 20 nt, synthetic construct
  misc_feature 1..20: note = spacer sequence
  source 1..20: mol_type = other RNA
ttgcatggggccggcagggc

SEQ ID NO: 5117 - RNA, 20 nt, synthetic construct
  misc_feature 1..20: note = spacer sequence
  source 1..20: mol_type = other RNA
acagccgctggccctggtgc

SEQ ID NO: 5118 - RNA, 20 nt, synthetic construct
  misc_feature 1..20: note = spacer sequence
  source 1..20: mol_type = other RNA
gagcagtgccgcccaccggc

SEQ ID NO: 5119 - RNA, 20 nt, synthetic construct
  misc_feature 1..20: note = spacer sequence
  source 1..20: mol_type = other RNA
gagtacagggcctccacagc

SEQ ID NO: 5120 - RNA, 20 nt, synthetic construct
  misc_feature 1..20: note = spacer sequence
  source 1..20: mol_type = other RNA
atttctcaccggccttagct

SEQ ID NO: 5121 - RNA, 20 nt, synthetic construct
  misc_feature 1..20: note = spacer sequence
  source 1..20: mol_type = other RNA
agcccagtgccggtgggcgg

SEQ ID NO: 5122 - RNA, 20 nt, synthetic construct
  misc_feature 1..20: note = spacer sequence
  source 1..20: mol_type = other RNA
caccggccttagctgcctcc

SEQ ID NO: 5123 - RNA, 20 nt, synthetic construct
  misc_feature 1..20: note = spacer sequence
  source 1..20: mol_type = other RNA
ccggccttagctgcctccct

SEQ ID NO: 5124 - RNA, 20 nt, synthetic construct
  misc_feature 1..20: note = spacer sequence
  source 1..20: mol_type = other RNA
ctgcggggcatggctcggga

SEQ ID NO: 5125 - RNA, 20 nt, synthetic construct
  misc_feature 1..20: note = spacer sequence
  source 1..20: mol_type = other RNA
ggacctgcagcccgccatgc

SEQ ID NO: 5126 - RNA, 20 nt, synthetic construct
  misc_feature 1..20: note = spacer sequence
  source 1..20: mol_type = other RNA
cgagccatgccccgcaggga

SEQ ID NO: 5127 - RNA, 20 nt, synthetic construct
  misc_feature 1..20: note = spacer sequence
  source 1..20: mol_type = other RNA
ggcatggcgggctgcaggtc

SEQ ID NO: 5128 - RNA, 20 nt, synthetic construct
  misc_feature 1..20: note = spacer sequence
  source 1..20: mol_type = other RNA
ccctctctgtgggctgctgt

SEQ ID NO: 5129 - RNA, 20 nt, synthetic construct
  misc_feature 1..20: note = spacer sequence
  source 1..20: mol_type = other RNA
ctgtgggctgctgtgctgcc

SEQ ID NO: 5130 - RNA, 20 nt, synthetic construct
  misc_feature 1..20: note = spacer sequence
  source 1..20: mol_type = other RNA
gtgggctgctgtgctgccgg

SEQ ID NO: 5131 - RNA, 20 nt, synthetic construct
  misc_feature 1..20: note = spacer sequence
  source 1..20: mol_type = other RNA
ggcagcacagcagcccacag

SEQ ID NO: 5132 - RNA, 20 nt, synthetic construct
  misc_feature 1..20: note = spacer sequence
  source 1..20: mol_type = other RNA
ccgacaagcaccgccccctg

SEQ ID NO: 5133 - RNA, 20 nt, synthetic construct
  misc_feature 1..20: note = spacer sequence
  source 1..20: mol_type = other RNA
gggaggctccggcagcacag

SEQ ID NO: 5134 - RNA, 20 nt, synthetic construct
  misc_feature 1..20: note = spacer sequence
  source 1..20: mol_type = other RNA
acggcgcccagtcccatcga

SEQ ID NO: 5135 - RNA, 20 nt, synthetic construct
  misc_feature 1..20: note = spacer sequence
  source 1..20: mol_type = other RNA
catcgacgacccaagggctg

SEQ ID NO: 5136 - RNA, 20 nt, synthetic construct
  misc_feature 1..20: note = spacer sequence
  source 1..20: mol_type = other RNA
acgacccaagggctgaggag

SEQ ID NO: 5137 - RNA, 20 nt, synthetic construct
  misc_feature 1..20: note = spacer sequence
  source 1..20: mol_type = other RNA
atgggactgggcgccgtaga

SEQ ID NO: 5138 - RNA, 20 nt, synthetic construct
  misc_feature 1..20: note = spacer sequence
  source 1..20: mol_type = other RNA
tcgatgggactgggcgccgt

SEQ ID NO: 5139 - RNA, 20 nt, synthetic construct
  misc_feature 1..20: note = spacer sequence
  source 1..20: mol_type = other RNA
gcccttgggtcgtcgatggg

SEQ ID NO: 5140 - RNA, 20 nt, synthetic construct
  misc_feature 1..20: note = spacer sequence
  source 1..20: mol_type = other RNA
tcagcccttgggtcgtcgat

SEQ ID NO: 5141 - RNA, 20 nt, synthetic construct
  misc_feature 1..20: note = spacer sequence
  source 1..20: mol_type = other RNA
catgccgtgcacccgcactc

SEQ ID NO: 5142 - RNA, 20 nt, synthetic construct
  misc_feature 1..20: note = spacer sequence
  source 1..20: mol_type = other RNA
acctgcagcccaggtgcggg

SEQ ID NO: 5143 - RNA, 20 nt, synthetic construct
  misc_feature 1..20: note = spacer sequence
  source 1..20: mol_type = other RNA
cgcacctgggctgcaggtgg

SEQ ID NO: 5144 - RNA, 20 nt, synthetic construct
  misc_feature 1..20: note = spacer sequence
  source 1..20: mol_type = other RNA
actgggtgacgccagctggg

SEQ ID NO: 5145 - RNA, 20 nt, synthetic construct
  misc_feature 1..20: note = spacer sequence
  source 1..20: mol_type = other RNA
cccagtggatcccgcacctg

SEQ ID NO: 5146 - RNA, 20 nt, synthetic construct
  misc_feature 1..20: note = spacer sequence
  source 1..20: mol_type = other RNA
tgagtttagtggggacctgc

SEQ ID NO: 5147 - RNA, 20 nt, synthetic construct
  misc_feature 1..20: note = spacer sequence
  source 1..20: mol_type = other RNA
ggagcccagctggcgtcacc

SEQ ID NO: 5148 - RNA, 20 nt, synthetic construct
  misc_feature 1..20: note = spacer sequence
  source 1..20: mol_type = other RNA
ccactaaactcaggagccca

SEQ ID NO: 5149 - RNA, 20 nt, synthetic construct
  misc_feature 1..20: note = spacer sequence
  source 1..20: mol_type = other RNA
gcaggtccccactaaactca

SEQ ID NO: 5150 - RNA, 20 nt, synthetic construct
  misc_feature 1..20: note = spacer sequence
  source 1..20: mol_type = other RNA
agctaagggattgtaaatgc

SEQ ID NO: 5151 - RNA, 20 nt, synthetic construct
  misc_feature 1..20: note = spacer sequence
  source 1..20: mol_type = other RNA
cttagctagacataaaggtt

SEQ ID NO: 5152 - RNA, 20 nt, synthetic construct
  misc_feature 1..20: note = spacer sequence
  source 1..20: mol_type = other RNA
gcaccctgtgtctagctcag

SEQ ID NO: 5153 - RNA, 20 nt, synthetic construct
  misc_feature 1..20: note = spacer sequence
  source 1..20: mol_type = other RNA
agctcagggtttgtgaatgc

SEQ ID NO: 5154 - RNA, 20 nt, synthetic construct
  misc_feature 1..20: note = spacer sequence
  source 1..20: mol_type = other RNA
gggtttgtgaatgcacgaat

SEQ ID NO: 5155 - RNA, 20 nt, synthetic construct
  misc_feature 1..20: note = spacer sequence
  source 1..20: mol_type = other RNA
caaaccctgagctagacaca

SEQ ID NO: 5156 - RNA, 20 nt, synthetic construct
  misc_feature 1..20: note = spacer sequence
  source 1..20: mol_type = other RNA
tgcattcacaaaccctgagc

SEQ ID NO: 5157 - RNA, 20 nt, synthetic construct
  misc_feature 1..20: note = spacer sequence
  source 1..20: mol_type = other RNA
acactctgtatctagctact

SEQ ID NO: 5158 - RNA, 20 nt, synthetic construct
  misc_feature 1..20: note = spacer sequence
  source 1..20: mol_type = other RNA
attcgtgcattcacaaaccc

SEQ ID NO: 5159 - RNA, 20 nt, synthetic construct
  misc_feature 1..20: note = spacer sequence
  source 1..20: mol_type = other RNA
gtatctagctactctggtgg

SEQ ID NO: 5160 - RNA, 20 nt, synthetic construct
  misc_feature 1..20: note = spacer sequence
  source 1..20: mol_type = other RNA
agctactctggtggggaggt

SEQ ID NO: 5161 - RNA, 20 nt, synthetic construct
  misc_feature 1..20: note = spacer sequence
  source 1..20: mol_type = other RNA
ggtggggaggtggagaacct

SEQ ID NO: 5162 - RNA, 20 nt, synthetic construct
  misc_feature 1..20: note = spacer sequence
  source 1..20: mol_type = other RNA
ccaccagagtagctagatac

SEQ ID NO: 5163 - RNA, 20 nt, synthetic construct
  misc_feature 1..20: note = spacer sequence
  source 1..20: mol_type = other RNA
acctccccaccagagtagct

SEQ ID NO: 5164 - RNA, 20 nt, synthetic construct
  misc_feature 1..20: note = spacer sequence
  source 1..20: mol_type = other RNA
ccacctccccaccagagtag

SEQ ID NO: 5165 - RNA, 20 nt, synthetic construct
  misc_feature 1..20: note = spacer sequence
  source 1..20: mol_type = other RNA
agctcagggattgtaaacac

SEQ ID NO: 5166 - RNA, 20 nt, synthetic construct
  misc_feature 1..20: note = spacer sequence
  source 1..20: mol_type = other RNA
gggattgtaaacacaccaat

SEQ ID NO: 5167 - RNA, 20 nt, synthetic construct
  misc_feature 1..20: note = spacer sequence
  source 1..20: mol_type = other RNA
ctgagctagacacaaaggtt

SEQ ID NO: 5168 - RNA, 20 nt, synthetic construct
  misc_feature 1..20: note = spacer sequence
  source 1..20: mol_type = other RNA
gcgccctgtcaaaacagacc

SEQ ID NO: 5169 - RNA, 20 nt, synthetic construct
  misc_feature 1..20: note = spacer sequence
  source 1..20: mol_type = other RNA
aaacagaccactcggctcta

SEQ ID NO: 5170 - RNA, 20 nt, synthetic construct
  misc_feature 1..20: note = spacer sequence
  source 1..20: mol_type = other RNA
gttttgacagggcgctgatt

SEQ ID NO: 5171 - RNA, 20 nt, synthetic construct
  misc_feature 1..20: note = spacer sequence
  source 1..20: mol_type = other RNA
gctctaccaatcagcaggat

SEQ ID NO: 5172 - RNA, 20 nt, synthetic construct
  misc_feature 1..20: note = spacer sequence
  source 1..20: mol_type = other RNA
accaatcagcaggatgtggg

SEQ ID NO: 5173 - RNA, 20 nt, synthetic construct
  misc_feature 1..20: note = spacer sequence
  source 1..20: mol_type = other RNA
gcaggatgtgggtggggcca

SEQ ID NO: 5174 - RNA, 20 nt, synthetic construct
  misc_feature 1..20: note = spacer sequence
  source 1..20: mol_type = other RNA
tgctgattggtagagccgag

SEQ ID NO: 5175 - RNA, 20 nt, synthetic construct
  misc_feature 1..20: note = spacer sequence
  source 1..20: mol_type = other RNA
ggccccacccacatcctgct

SEQ ID NO: 5176 - RNA, 20 nt, synthetic construct
  misc_feature 1..20: note = spacer sequence
  source 1..20: mol_type = other RNA
tttatctggccccacccaca

SEQ ID NO: 5177 - RNA, 20 nt, synthetic construct
  misc_feature 1..20: note = spacer sequence
  source 1..20: mol_type = other RNA
ggcagcctgcttttattctt

SEQ ID NO: 5178 - RNA, 20 nt, synthetic construct
  misc_feature 1..20: note = spacer sequence
  source 1..20: mol_type = other RNA
ccttccatactgtggaagct

SEQ ID NO: 5179 - RNA, 20 nt, synthetic construct
  misc_feature 1..20: note = spacer sequence
  source 1..20: mol_type = other RNA
atactgtggaagctttgtct

SEQ ID NO: 5180 - RNA, 20 nt, synthetic construct
  misc_feature 1..20: note = spacer sequence
  source 1..20: mol_type = other RNA
acagtatggaaggggaccca

SEQ ID NO: 5181 - RNA, 20 nt, synthetic construct
  misc_feature 1..20: note = spacer sequence
  source 1..20: mol_type = other RNA
ttctttgcaataaatcttgc

SEQ ID NO: 5182 - RNA, 20 nt, synthetic construct
  misc_feature 1..20: note = spacer sequence
  source 1..20: mol_type = other RNA
ttgcaataaatcttgctgct

SEQ ID NO: 5183 - RNA, 20 nt, synthetic construct
  misc_feature 1..20: note = spacer sequence
  source 1..20: mol_type = other RNA
tgctgctgctcactctttgg

SEQ ID NO: 5184 - RNA, 20 nt, synthetic construct
  misc_feature 1..20: note = spacer sequence
  source 1..20: mol_type = other RNA
ctctttgggtccacactgcc

SEQ ID NO: 5185 - RNA, 20 nt, synthetic construct
  misc_feature 1..20: note = spacer sequence
  source 1..20: mol_type = other RNA
ttgggtccacactgccttta

SEQ ID NO: 5186 - RNA, 20 nt, synthetic construct
  misc_feature 1..20: note = spacer sequence
  source 1..20: mol_type = other RNA
acactgcctttatgagctgt

SEQ ID NO: 5187 - RNA, 20 nt, synthetic construct
  misc_feature 1..20: note = spacer sequence
  source 1..20: mol_type = other RNA
taaaggcagtgtggacccaa

SEQ ID NO: 5188 - RNA, 20 nt, synthetic construct
  misc_feature 1..20: note = spacer sequence
  source 1..20: mol_type = other RNA
ccacgaaggtctgcagcttc

SEQ ID NO: 5189 - RNA, 20 nt, synthetic construct
  misc_feature 1..20: note = spacer sequence
  source 1..20: mol_type = other RNA
tggtgagtgttacagctcat

SEQ ID NO: 5190 - RNA, 20 nt, synthetic construct
  misc_feature 1..20: note = spacer sequence
  source 1..20: mol_type = other RNA
gcagcttcactgctgaagcc

SEQ ID NO: 5191 - RNA, 20 nt, synthetic construct
  misc_feature 1..20: note = spacer sequence
  source 1..20: mol_type = other RNA
ctgctgaagccaatgagacc

SEQ ID NO: 5192 - RNA, 20 nt, synthetic construct
  misc_feature 1..20: note = spacer sequence
  source 1..20: mol_type = other RNA
gcagtgaagctgcagacctt

SEQ ID NO: 5193 - RNA, 20 nt, synthetic construct
  misc_feature 1..20: note = spacer sequence
  source 1..20: mol_type = other RNA
ttggcttcagcagtgaagct

SEQ ID NO: 5194 - RNA, 20 nt, synthetic construct
  misc_feature 1..20: note = spacer sequence
  source 1..20: mol_type = other RNA
cattggcttcagcagtgaag

SEQ ID NO: 5195 - RNA, 20 nt, synthetic construct
  misc_feature 1..20: note = spacer sequence
  source 1..20: mol_type = other RNA
tggtctcattggcttcagca

SEQ ID NO: 5196 - RNA, 20 nt, synthetic construct
  misc_feature 1..20: note = spacer sequence
  source 1..20: mol_type = other RNA
cggggggttcgtggtctcat

SEQ ID NO: 5197 - RNA, 20 nt, synthetic construct
  misc_feature 1..20: note = spacer sequence
  source 1..20: mol_type = other RNA
tcccggggggttcgtggtct

SEQ ID NO: 5198 - RNA, 20 nt, synthetic construct
  misc_feature 1..20: note = spacer sequence
  source 1..20: mol_type = other RNA
ttcctcccggggggttcgtg

SEQ ID NO: 5199 - RNA, 20 nt, synthetic construct
  misc_feature 1..20: note = spacer sequence
  source 1..20: mol_type = other RNA
agttgttcattcctcccggg

SEQ ID NO: 5200 - RNA, 20 nt, synthetic construct
  misc_feature 1..20: note = spacer sequence
  source 1..20: mol_type = other RNA
caagttgttcattcctcccg

SEQ ID NO: 5201 - RNA, 20 nt, synthetic construct
  misc_feature 1..20: note = spacer sequence
  source 1..20: mol_type = other RNA
taaggcagcgcgtctcaagt

SEQ ID NO: 5202 - RNA, 20 nt, synthetic construct
  misc_feature 1..20: note = spacer sequence
  source 1..20: mol_type = other RNA
ccgcgaaggtctgcagcttc

SEQ ID NO: 5203 - RNA, 20 nt, synthetic construct
  misc_feature 1..20: note = spacer sequence
  source 1..20: mol_type = other RNA
cggtgagtgttacagctctt

SEQ ID NO: 5204 - RNA, 20 nt, synthetic construct
  misc_feature 1..20: note = spacer sequence
  source 1..20: mol_type = other RNA
gcagcttcactcctgagcca

SEQ ID NO: 5205 - RNA, 20 nt, synthetic construct
  misc_feature 1..20: note = spacer sequence
  source 1..20: mol_type = other RNA
ctcctgagccagcgagacca

SEQ ID NO: 5206 - RNA, 20 nt, synthetic construct
  misc_feature 1..20: note = spacer sequence
  source 1..20: mol_type = other RNA
tgagccagcgagaccacaaa

SEQ ID NO: 5207 - RNA, 20 nt, synthetic construct
  misc_feature 1..20: note = spacer sequence
  source 1..20: mol_type = other RNA
ggagtgaagctgcagacctt

SEQ ID NO: 5208 - RNA, 20 nt, synthetic construct
  misc_feature 1..20: note = spacer sequence
  source 1..20: mol_type = other RNA
ctggctcaggagtgaagctg

SEQ ID NO: 5209 - RNA, 20 nt, synthetic construct
  misc_feature 1..20: note = spacer sequence
  source 1..20: mol_type = other RNA
cgctggctcaggagtgaagc

SEQ ID NO: 5210 - RNA, 20 nt, synthetic construct
  misc_feature 1..20: note = spacer sequence
  source 1..20: mol_type = other RNA
ggtgggtttgtggtctcgct

SEQ ID NO: 5211 - RNA, 20 nt, synthetic construct
  misc_feature 1..20: note = spacer sequence
  source 1..20: mol_type = other RNA
ttctggtgggtttgtggtct

SEQ ID NO: 5212 - RNA, 20 nt, synthetic construct
  misc_feature 1..20: note = spacer sequence
  source 1..20: mol_type = other RNA
tccttctggtgggtttgtgg

SEQ ID NO: 5213 - RNA, 20 nt, synthetic construct
  misc_feature 1..20: note = spacer sequence
  source 1..20: mol_type = other RNA
gaacacatctgaacatcaga

SEQ ID NO: 5214 - RNA, 20 nt, synthetic construct
  misc_feature 1..20: note = spacer sequence
  source 1..20: mol_type = other RNA
gagtttcttccttctggtgg

SEQ ID NO: 5215 - RNA, 20 nt, synthetic construct
  misc_feature 1..20: note = spacer sequence
  source 1..20: mol_type = other RNA
gaacatcagaaggaacaaac

SEQ ID NO: 5216 - RNA, 20 nt, synthetic construct
  misc_feature 1..20: note = spacer sequence
  source 1..20: mol_type = other RNA
gatgtgttcggagtttcttc

SEQ ID NO: 5217 - RNA, 20 nt, synthetic construct
  misc_feature 1..20: note = spacer sequence
  source 1..20: mol_type = other RNA
gaaggaacaaactccggaca

SEQ ID NO: 5218 - RNA, 20 nt, synthetic construct
  misc_feature 1..20: note = spacer sequence
  source 1..20: mol_type = other RNA
gatgttcagatgtgttcgga

SEQ ID NO: 5219 - RNA, 20 nt, synthetic construct
  misc_feature 1..20: note = spacer sequence
  source 1..20: mol_type = other RNA
ttctgatgttcagatgtgtt

SEQ ID NO: 5220 - RNA, 20 nt, synthetic construct
  misc_feature 1..20: note = spacer sequence
  source 1..20: mol_type = other RNA
ggacacgccacctttaagaa

SEQ ID NO: 5221 - RNA, 20 nt, synthetic construct
  misc_feature 1..20: note = spacer sequence
  source 1..20: mol_type = other RNA
ggagtttgttccttctgatg

SEQ ID NO: 5222 - RNA, 20 nt, synthetic construct
  misc_feature 1..20: note = spacer sequence
  source 1..20: mol_type = other RNA
taaaggtggcgtgtccggag

SEQ ID NO: 5223 - RNA, 20 nt, synthetic construct
  misc_feature 1..20: note = spacer sequence
  source 1..20: mol_type = other RNA
ccgcgagggtccacggcttc

SEQ ID NO: 5224 - RNA, 20 nt, synthetic construct
  misc_feature 1..20: note = spacer sequence
  source 1..20: mol_type = other RNA
cggtgagtgttacagttctt

SEQ ID NO: 5225 - RNA, 20 nt, synthetic construct
  misc_feature 1..20: note = spacer sequence
  source 1..20: mol_type = other RNA
acggcttcattcttgaagtc

SEQ ID NO: 5226 - RNA, 20 nt, synthetic construct
  misc_feature 1..20: note = spacer sequence
  source 1..20: mol_type = other RNA
ttcttgaagtcagtgagacc

SEQ ID NO: 5227 - RNA, 20 nt, synthetic construct
  misc_feature 1..20: note = spacer sequence
  source 1..20: mol_type = other RNA
tgaagtcagtgagaccaaga

SEQ ID NO: 5228 - RNA, 20 nt, synthetic construct
  misc_feature 1..20: note = spacer sequence
  source 1..20: mol_type = other RNA
agaatgaagccgtggaccct

SEQ ID NO: 5229 - RNA, 20 nt, synthetic construct
  misc_feature 1..20: note = spacer sequence
  source 1..20: mol_type = other RNA
gtgagaccaagaacccacca

SEQ ID NO: 5230 - RNA, 20 nt, synthetic construct
  misc_feature 1..20: note = spacer sequence
  source 1..20: mol_type = other RNA
ctgacttcaagaatgaagcc

SEQ ID NO: 5231 - RNA, 20 nt, synthetic construct
  misc_feature 1..20: note = spacer sequence
  source 1..20: mol_type = other RNA
cactgacttcaagaatgaag

SEQ ID NO: 5232 - RNA, 20 nt, synthetic construct
  misc_feature 1..20: note = spacer sequence
  source 1..20: mol_type = other RNA
tggtctcactgacttcaaga

SEQ ID NO: 5233 - RNA, 20 nt, synthetic construct
  misc_feature 1..20: note = spacer sequence
  source 1..20: mol_type = other RNA
ggacacaccagctactaggg

SEQ ID NO: 5234 - RNA, 20 nt, synthetic construct
  misc_feature 1..20: note = spacer sequence
  source 1..20: mol_type = other RNA
ggaattggtgggttcttggt

SEQ ID NO: 5235 - RNA, 20 nt, synthetic construct
  misc_feature 1..20: note = spacer sequence
  source 1..20: mol_type = other RNA
ctagtagctggtgtgtccgg

SEQ ID NO: 5236 - RNA, 20 nt, synthetic construct
  misc_feature 1..20: note = spacer sequence
  source 1..20: mol_type = other RNA
gcctccctagtagctggtgt

SEQ ID NO: 5237 - RNA, 20 nt, synthetic construct
  misc_feature 1..20: note = spacer sequence
  source 1..20: mol_type = other RNA
cctcagcctccctagtagct

SEQ ID NO: 5238 - RNA, 20 nt, synthetic construct
  misc_feature 1..20: note = spacer sequence
  source 1..20: mol_type = other RNA
cctcacctcagcctccctag

SEQ ID NO: 5239 - RNA, 20 nt, synthetic construct
  misc_feature 1..20: note = spacer sequence
  source 1..20: mol_type = other RNA
cctgaatccaggaagtcgag

SEQ ID NO: 5240 - RNA, 20 nt, synthetic construct
  misc_feature 1..20: note = spacer sequence
  source 1..20: mol_type = other RNA
ggtgatcccctcacctcagc

SEQ ID NO: 5241 - RNA, 20 nt, synthetic construct
  misc_feature 1..20: note = spacer sequence
  source 1..20: mol_type = other RNA
aggaagtcgagggtgcagtg

SEQ ID NO: 5242 - RNA, 20 nt, synthetic construct
  misc_feature 1..20: note = spacer sequence
  source 1..20: mol_type = other RNA
tggattcaggtgatcccctc

SEQ ID NO: 5243 - RNA, 20 nt, synthetic construct
  misc_feature 1..20: note = spacer sequence
  source 1..20: mol_type = other RNA
agggtgcagtgagccgagat

SEQ ID NO: 5244 - RNA, 20 nt, synthetic construct
  misc_feature 1..20: note = spacer sequence
  source 1..20: mol_type = other RNA
acttcctggattcaggtgat

SEQ ID NO: 5245 - RNA, 20 nt, synthetic construct
  misc_feature 1..20: note = spacer sequence
  source 1..20: mol_type = other RNA
ctgcaccctcgacttcctgg

SEQ ID NO: 5246 - RNA, 20 nt, synthetic construct
  misc_feature 1..20: note = spacer sequence
  source 1..20: mol_type = other RNA
gctcactgcaccctcgactt

SEQ ID NO: 5247 - RNA, 20 nt, synthetic construct
  misc_feature 1..20: note = spacer sequence
  source 1..20: mol_type = other RNA
cggctcactgcaccctcgac

SEQ ID NO: 5248 - RNA, 20 nt, synthetic construct
  misc_feature 1..20: note = spacer sequence
  source 1..20: mol_type = other RNA
tgccgttacactccagcctg

SEQ ID NO: 5249 - RNA, 20 nt, synthetic construct
  misc_feature 1..20: note = spacer sequence
  source 1..20: mol_type = other RNA
agcctgagtgacagagtgag

SEQ ID NO: 5250 - RNA, 20 nt, synthetic construct
  misc_feature 1..20: note = spacer sequence
  source 1..20: mol_type = other RNA
ggctggagtgtaacggcatg

SEQ ID NO: 5251 - RNA, 20 nt, synthetic construct
  misc_feature 1..20: note = spacer sequence
  source 1..20: mol_type = other RNA
ctcaggctggagtgtaacgg

SEQ ID NO: 5252 - RNA, 20 nt, synthetic construct
  misc_feature 1..20: note = spacer sequence
  source 1..20: mol_type = other RNA
gtcactcaggctggagtgta

SEQ ID NO: 5253 - RNA, 20 nt, synthetic construct
  misc_feature 1..20: note = spacer sequence
  source 1..20: mol_type = other RNA
ctctgtcactcaggctggag

SEQ ID NO: 5254 - RNA, 20 nt, synthetic construct
  misc_feature 1..20: note = spacer sequence
  source 1..20: mol_type = other RNA
cactctgtcactcaggctgg

SEQ ID NO: 5255 - RNA, 20 nt, synthetic construct
  misc_feature 1..20: note = spacer sequence
  source 1..20: mol_type = other RNA
tgtgtcaaaaaaacagaaca

SEQ ID NO: 5256 - RNA, 20 nt, synthetic construct
  misc_feature 1..20: note = spacer sequence
  source 1..20: mol_type = other RNA
aaaaaacagaacaaaataaa

SEQ ID NO: 5257 - RNA, 20 nt, synthetic construct
  misc_feature 1..20: note = spacer sequence
  source 1..20: mol_type = other RNA
gtttttttgacacaagatct

SEQ ID NO: 5258 - RNA, 20 nt, synthetic construct
  misc_feature 1..20: note = spacer sequence
  source 1..20: mol_type = other RNA
tgttttattttgttctgttt

SEQ ID NO: 5259 - RNA, 20 nt, synthetic construct
  misc_feature 1..20: note = spacer sequence
  source 1..20: mol_type = other RNA
acgttcttgttttattttgt

SEQ ID NO: 5260 - RNA, 20 nt, synthetic construct
  misc_feature 1..20: note = spacer sequence
  source 1..20: mol_type = other RNA
gagatggagtccagacttaa

SEQ ID NO: 5261 - RNA, 20 nt, synthetic construct
  misc_feature 1..20: note = spacer sequence
  source 1..20: mol_type = other RNA
gaattaacacacagcctatt

SEQ ID NO: 5262 - RNA, 20 nt, synthetic construct
  misc_feature 1..20: note = spacer sequence
  source 1..20: mol_type = other RNA
cagaattaacacacagccta

SEQ ID NO: 5263 - RNA, 20 nt, synthetic construct
  misc_feature 1..20: note = spacer sequence
  source 1..20: mol_type = other RNA
atctcagaattaacacacag

SEQ ID NO: 5264 - RNA, 20 nt, synthetic construct
  misc_feature 1..20: note = spacer sequence
  source 1..20: mol_type = other RNA
agacttaagaatgatcctga

SEQ ID NO: 5265 - RNA, 20 nt, synthetic construct
  misc_feature 1..20: note = spacer sequence
  source 1..20: mol_type = other RNA
ggactccatctcagaattaa

SEQ ID NO: 5266 - RNA, 20 nt, synthetic construct
  misc_feature 1..20: note = spacer sequence
  source 1..20: mol_type = other RNA
taagtctggactccatctca

SEQ ID NO: 5267 - RNA, 20 nt, synthetic construct
  misc_feature 1..20: note = spacer sequence
  source 1..20: mol_type = other RNA
ttcttaagtctggactccat

SEQ ID NO: 5268 - RNA, 20 nt, synthetic construct
  misc_feature 1..20: note = spacer sequence
  source 1..20: mol_type = other RNA
tgaggcttagacccatatcc

SEQ ID NO: 5269 - RNA, 20 nt, synthetic construct
  misc_feature 1..20: note = spacer sequence
  source 1..20: mol_type = other RNA
ggatcattcttaagtctgga

SEQ ID NO: 5270 - RNA, 20 nt, synthetic construct
  misc_feature 1..20: note = spacer sequence
  source 1..20: mol_type = other RNA
aagcctcaggatcattctta

SEQ ID NO: 5271 - RNA, 20 nt, synthetic construct
  misc_feature 1..20: note = spacer sequence
  source 1..20: mol_type = other RNA
aagaggatgattccagcctg

SEQ ID NO: 5272 - RNA, 20 nt, synthetic construct
  misc_feature 1..20: note = spacer sequence
  source 1..20: mol_type = other RNA
tggatatgggtctaagcctc

SEQ ID NO: 5273 - RNA, 20 nt, synthetic construct
  misc_feature 1..20: note = spacer sequence
  source 1..20: mol_type = other RNA
tcttggatatgggtctaagc

SEQ ID NO: 5274 - RNA, 20 nt, synthetic construct
  misc_feature 1..20: note = spacer sequence
  source 1..20: mol_type = other RNA
tcctcttggatatgggtcta

SEQ ID NO: 5275 - RNA, 20 nt, synthetic construct
  misc_feature 1..20: note = spacer sequence
  source 1..20: mol_type = other RNA
agcctggcacttataggttc

SEQ ID NO: 5276 - RNA, 20 nt, synthetic construct
  misc_feature 1..20: note = spacer sequence
  source 1..20: mol_type = other RNA
tcaggcacttcagatgcacc

SEQ ID NO: 5277 - RNA, 20 nt, synthetic construct
  misc_feature 1..20: note = spacer sequence
  source 1..20: mol_type = other RNA
ggcacttcagatgcaccctg

SEQ ID NO: 5278 - RNA, 20 nt, synthetic construct
  misc_feature 1..20: note = spacer sequence
  source 1..20: mol_type = other RNA
gatgcaccctgtcctgaatt

SEQ ID NO: 5279 - RNA, 20 nt, synthetic construct
  misc_feature 1..20: note = spacer sequence
  source 1..20: mol_type = other RNA
gaagtgcctgaagaacctat

SEQ ID NO: 5280 - RNA, 20 nt, synthetic construct
  misc_feature 1..20: note = spacer sequence
  source 1..20: mol_type = other RNA
tgaattaagccctttgtcct

SEQ ID NO: 5281 - RNA, 20 nt, synthetic construct
  misc_feature 1..20: note = spacer sequence
  source 1..20: mol_type = other RNA
ggacagggtgcatctgaagt

SEQ ID NO: 5282 - RNA, 20 nt, synthetic construct
  misc_feature 1..20: note = spacer sequence
  source 1..20: mol_type = other RNA
ttgaacctgctttccttggt

SEQ ID NO: 5283 - RNA, 20 nt, synthetic construct
  misc_feature 1..20: note = spacer sequence
  source 1..20: mol_type = other RNA
aggacaaagggcttaattca

SEQ ID NO: 5284 - RNA, 20 nt, synthetic construct
  misc_feature 1..20: note = spacer sequence
  source 1..20: mol_type = other RNA
ttggtaaacagcaccaaggg

SEQ ID NO: 5285 - RNA, 20 nt, synthetic construct
  misc_feature 1..20: note = spacer sequence
  source 1..20: mol_type = other RNA
agcccccttggtgctgttta

SEQ ID NO: 5286 - RNA, 20 nt, synthetic construct
  misc_feature 1..20: note = spacer sequence
  source 1..20: mol_type = other RNA
ctctctcaccatgcacctct

SEQ ID NO: 5287 - RNA, 20 nt, synthetic construct
  misc_feature 1..20: note = spacer sequence
  source 1..20: mol_type = other RNA
ctcaccatgcacctctaatg

SEQ ID NO: 5288 - RNA, 20 nt, synthetic construct
  misc_feature 1..20: note = spacer sequence
  source 1..20: mol_type = other RNA
caccatgcacctctaatggg

SEQ ID NO: 5289 - RNA, 20 nt, synthetic construct
  misc_feature 1..20: note = spacer sequence
  source 1..20: mol_type = other RNA
ccatgcacctctaatgggtg

SEQ ID NO: 5290 - RNA, 20 nt, synthetic construct
  misc_feature 1..20: note = spacer sequence
  source 1..20: mol_type = other RNA
aatgggtggctggacttgtg

SEQ ID NO: 5291 - RNA, 20 nt, synthetic construct
  misc_feature 1..20: note = spacer sequence
  source 1..20: mol_type = other RNA
agccacccattagaggtgca

SEQ ID NO: 5292 - RNA, 20 nt, synthetic construct
  misc_feature 1..20: note = spacer sequence
  source 1..20: mol_type = other RNA
gtgatctcccagctttcttc

SEQ ID NO: 5293 - RNA, 20 nt, synthetic construct
  misc_feature 1..20: note = spacer sequence
  source 1..20: mol_type = other RNA
cggaaatgcaaccacaagtc

SEQ ID NO: 5294 - RNA, 20 nt, synthetic construct
  misc_feature 1..20: note = spacer sequence
  source 1..20: mol_type = other RNA
cccagctttcttccagtgat

SEQ ID NO: 5295 - RNA, 20 nt, synthetic construct
  misc_feature 1..20: note = spacer sequence
  source 1..20: mol_type = other RNA
cagctttcttccagtgatgg

SEQ ID NO: 5296 - RNA, 20 nt, synthetic construct
  misc_feature 1..20: note = spacer sequence
  source 1..20: mol_type = other RNA
tccagtgatggccttaggtg

SEQ ID NO: 5297 - RNA, 20 nt, synthetic construct
  misc_feature 1..20: note = spacer sequence
  source 1..20: mol_type = other RNA
agtgatggccttaggtgggc

SEQ ID NO: 5298 - RNA, 20 nt, synthetic construct
  misc_feature 1..20: note = spacer sequence
  source 1..20: mol_type = other RNA
ctggaagaaagctgggagat

SEQ ID NO: 5299 - RNA, 20 nt, synthetic construct
  misc_feature 1..20: note = spacer sequence
  source 1..20: mol_type = other RNA
tatcctgtctcccaaatggc

SEQ ID NO: 5300 - RNA, 20 nt, synthetic construct
  misc_feature 1..20: note = spacer sequence
  source 1..20: mol_type = other RNA
tgtctcccaaatggcctctc

SEQ ID NO: 5301 - RNA, 20 nt, synthetic construct
  misc_feature 1..20: note = spacer sequence
  source 1..20: mol_type = other RNA
cccaaatggcctctctgcct

SEQ ID NO: 5302 - RNA, 20 nt, synthetic construct
  misc_feature 1..20: note = spacer sequence
  source 1..20: mol_type = other RNA
caaatggcctctctgccttg

SEQ ID NO: 5303 - RNA, 20 nt, synthetic construct
  misc_feature 1..20: note = spacer sequence
  source 1..20: mol_type = other RNA
ctgccttgagtctcacccca

SEQ ID NO: 5304 - RNA, 20 nt, synthetic construct
  misc_feature 1..20: note = spacer sequence
  source 1..20: mol_type = other RNA
gccttgagtctcaccccatc

SEQ ID NO: 5305 - RNA, 20 nt, synthetic construct
  misc_feature 1..20: note = spacer sequence
  source 1..20: mol_type = other RNA
aggcagagaggccatttggg

SEQ ID NO: 5306 - RNA, 20 nt, synthetic construct
  misc_feature 1..20: note = spacer sequence
  source 1..20: mol_type = other RNA
caccccatctgctctcagtc

SEQ ID NO: 5307 - RNA, 20 nt, synthetic construct
  misc_feature 1..20: note = spacer sequence
  source 1..20: mol_type = other RNA
ccccatctgctctcagtcca

SEQ ID NO: 5308 - RNA, 20 nt, synthetic construct
  misc_feature 1..20: note = spacer sequence
  source 1..20: mol_type = other RNA
gctctcagtccacccactga

SEQ ID NO: 5309 - RNA, 20 nt, synthetic construct
  misc_feature 1..20: note = spacer sequence
  source 1..20: mol_type = other RNA
cagtccacccactgagctat

SEQ ID NO: 5310 - RNA, 20 nt, synthetic construct
  misc_feature 1..20: note = spacer sequence
  source 1..20: mol_type = other RNA
gtccacccactgagctattc

SEQ ID NO: 5311 - RNA, 20 nt, synthetic construct
  misc_feature 1..20: note = spacer sequence
  source 1..20: mol_type = other RNA
acccactgagctattccaga

SEQ ID NO: 5312 - RNA, 20 nt, synthetic construct
  misc_feature 1..20: note = spacer sequence
  source 1..20: mol_type = other RNA
gtgggtggactgagagcaga

SEQ ID NO: 5313 - RNA, 20 nt, synthetic construct
  misc_feature 1..20: note = spacer sequence
  source 1..20: mol_type = other RNA
agagaccattctgactccct

SEQ ID NO: 5314 - RNA, 20 nt, synthetic construct
  misc_feature 1..20: note = spacer sequence
  source 1..20: mol_type = other RNA
ggaatagctcagtgggtgga

SEQ ID NO: 5315 - RNA, 20 nt, synthetic construct
  misc_feature 1..20: note = spacer sequence
  source 1..20: mol_type = other RNA
ctggaatagctcagtgggtg

SEQ ID NO: 5316 - RNA, 20 nt, synthetic construct
  misc_feature 1..20: note = spacer sequence
  source 1..20: mol_type = other RNA
gactccctgtggacacccct

SEQ ID NO: 5317 - RNA, 20 nt, synthetic construct
  misc_feature 1..20: note = spacer sequence
  source 1..20: mol_type = other RNA
gaatggtctctggaatagct

SEQ ID NO: 5318 - RNA, 20 nt, synthetic construct
  misc_feature 1..20: note = spacer sequence
  source 1..20: mol_type = other RNA
ctgtggacacccctctggtg

SEQ ID NO: 5319 - RNA, 20 nt, synthetic construct
  misc_feature 1..20: note = spacer sequence
  source 1..20: mol_type = other RNA
acagggagtcagaatggtct

SEQ ID NO: 5320 - RNA, 20 nt, synthetic construct
  misc_feature 1..20: note = spacer sequence
  source 1..20: mol_type = other RNA
ggtggcttctcctctctgtc

SEQ ID NO: 5321 - RNA, 20 nt, synthetic construct
  misc_feature 1..20: note = spacer sequence
  source 1..20: mol_type = other RNA
cctctctgtcagttagaaat

SEQ ID NO: 5322 - RNA, 20 nt, synthetic construct
  misc_feature 1..20: note = spacer sequence
  source 1..20: mol_type = other RNA
tctctgtcagttagaaattg

SEQ ID NO: 5323 - RNA, 20 nt, synthetic construct
  misc_feature 1..20: note = spacer sequence
  source 1..20: mol_type = other RNA
ctgtcagttagaaattgctt

SEQ ID NO: 5324 - RNA, 20 nt, synthetic construct
  misc_feature 1..20: note = spacer sequence
  source 1..20: mol_type = other RNA
gtcagttagaaattgctttt

SEQ ID NO: 5325 - RNA, 20 nt, synthetic construct
  misc_feature 1..20: note = spacer sequence
  source 1..20: mol_type = other RNA
gttagaaattgcttttgact

SEQ ID NO: 5326 - RNA, 20 nt, synthetic construct
  misc_feature 1..20: note = spacer sequence
  source 1..20: mol_type = other RNA
aactgacagagaggagaagc

SEQ ID NO: 5327 - RNA, 20 nt, synthetic construct
  misc_feature 1..20: note = spacer sequence
  source 1..20: mol_type = other RNA
aaagcaatttctaactgaca

SEQ ID NO: 5328 - RNA, 20 nt, synthetic construct
  misc_feature 1..20: note = spacer sequence
  source 1..20: mol_type = other RNA
cgtgatgaaaagtacacaga

SEQ ID NO: 5329 - RNA, 20 nt, synthetic construct
  misc_feature 1..20: note = spacer sequence
  source 1..20: mol_type = other RNA
tgatgaaaagtacacagata

SEQ ID NO: 5330 - RNA, 20 nt, synthetic construct
  misc_feature 1..20: note = spacer sequence
  source 1..20: mol_type = other RNA
cgagaaaaataaacctttat

SEQ ID NO: 5331 - RNA, 20 nt, synthetic construct
  misc_feature 1..20: note = spacer sequence
  source 1..20: mol_type = other RNA
tcacgagaaaaataaacctt

SEQ ID NO: 5332 - RNA, 20 nt, synthetic construct
  misc_feature 1..20: note = spacer sequence
  source 1..20: mol_type = other RNA
gtgtacttttcatcacgaga

SEQ ID NO: 5333 - RNA, 20 nt, synthetic construct
  misc_feature 1..20: note = spacer sequence
  source 1..20: mol_type = other RNA
atcgataaccattgagggtt

SEQ ID NO: 5334 - RNA, 20 nt, synthetic construct
  misc_feature 1..20: note = spacer sequence
  source 1..20: mol_type = other RNA
ataaccattgagggtttctt

SEQ ID NO: 5335 - RNA, 20 nt, synthetic construct
  misc_feature 1..20: note = spacer sequence
  source 1..20: mol_type = other RNA
atggaagtaggctgcttatc

SEQ ID NO: 5336 - RNA, 20 nt, synthetic construct
  misc_feature 1..20: note = spacer sequence
  source 1..20: mol_type = other RNA
atggttatcgatggaagtag

SEQ ID NO: 5337 - RNA, 20 nt, synthetic construct
  misc_feature 1..20: note = spacer sequence
  source 1..20: mol_type = other RNA
tatgactcttacagcaatga

SEQ ID NO: 5338 - RNA, 20 nt, synthetic construct
  misc_feature 1..20: note = spacer sequence
  source 1..20: mol_type = other RNA
taagaaaccctcaatggtta

SEQ ID NO: 5339 - RNA, 20 nt, synthetic construct
  misc_feature 1..20: note = spacer sequence
  source 1..20: mol_type = other RNA
tacagcaatgaaatgtgtat

SEQ ID NO: 5340 - RNA, 20 nt, synthetic construct
  misc_feature 1..20: note = spacer sequence
  source 1..20: mol_type = other RNA
ttgctgtaagagtcataaga

SEQ ID NO: 5341 - RNA, 20 nt, synthetic construct
  misc_feature 1..20: note = spacer sequence
  source 1..20: mol_type = other RNA
ttatactgtaaatacacatt

SEQ ID NO: 5342 - RNA, 20 nt, synthetic construct
  misc_feature 1..20: note = spacer sequence
  source 1..20: mol_type = other RNA
actgcccaggtgattctatt

SEQ ID NO: 5343 - RNA, 20 nt, synthetic construct
  misc_feature 1..20: note = spacer sequence
  source 1..20: mol_type = other RNA
cctgggcagttgaaaactaa

SEQ ID NO: 5344 - RNA, 20 nt, synthetic construct
  misc_feature 1..20: note = spacer sequence
  source 1..20: mol_type = other RNA
attgtgcagccagggttgat

SEQ ID NO: 5345 - RNA, 20 nt, synthetic construct
  misc_feature 1..20: note = spacer sequence
  source 1..20: mol_type = other RNA
accctggctgcacaatagaa

SEQ ID NO: 5346 - RNA, 20 nt, synthetic construct
  misc_feature 1..20: note = spacer sequence
  source 1..20: mol_type = other RNA
aggcccagtgcctttgattt

SEQ ID NO: 5347 - RNA, 20 nt, synthetic construct
  misc_feature 1..20: note = spacer sequence
  source 1..20: mol_type = other RNA
aaggcactgggcctagatgc

SEQ ID NO: 5348 - RNA, 20 nt, synthetic construct
  misc_feature 1..20: note = spacer sequence
  source 1..20: mol_type = other RNA
gctgcaaatcaaaggcactg

SEQ ID NO: 5349 - RNA, 20 nt, synthetic construct
  misc_feature 1..20: note = spacer sequence
  source 1..20: mol_type = other RNA
agagagaattattgaaactg

SEQ ID NO: 5350 - RNA, 20 nt, synthetic construct
  misc_feature 1..20: note = spacer sequence
  source 1..20: mol_type = other RNA
agacctcagctgcaaatcaa

SEQ ID NO: 5351 - RNA, 20 nt, synthetic construct
  misc_feature 1..20: note = spacer sequence
  source 1..20: mol_type = other RNA
ctagacctcagctgcaaatc

SEQ ID NO: 5352 - RNA, 20 nt, synthetic construct
  misc_feature 1..20: note = spacer sequence
  source 1..20: mol_type = other RNA
ctctagacctcagctgcaaa

SEQ ID NO: 5353 - RNA, 20 nt, synthetic construct
  misc_feature 1..20: note = spacer sequence
  source 1..20: mol_type = other RNA
ataattctctctagacctca

SEQ ID NO: 5354 - RNA, 20 nt, synthetic construct
  misc_feature 1..20: note = spacer sequence
  source 1..20: mol_type = other RNA
cagctacttgggaggctgag

SEQ ID NO: 5355 - RNA, 20 nt, synthetic construct
  misc_feature 1..20: note = spacer sequence
  source 1..20: mol_type = other RNA
caagtagctgggactgcagt

SEQ ID NO: 5356 - RNA, 20 nt, synthetic construct
  misc_feature 1..20: note = spacer sequence
  source 1..20: mol_type = other RNA
gcctcccaagtagctgggac

SEQ ID NO: 5357 - RNA, 20 nt, synthetic construct
  misc_feature 1..20: note = spacer sequence
  source 1..20: mol_type = other RNA
aacctcagcctcccaagtag

SEQ ID NO: 5358 - RNA, 20 nt, synthetic construct
  misc_feature 1..20: note = spacer sequence
  source 1..20: mol_type = other RNA
ccaacctcagcctcccaagt

SEQ ID NO: 5359 - RNA, 20 nt, synthetic construct
  misc_feature 1..20: note = spacer sequence
  source 1..20: mol_type = other RNA
ccccgctgggcttaggcaat

SEQ ID NO: 5360 - RNA, 20 nt, synthetic construct
  misc_feature 1..20: note = spacer sequence
  source 1..20: mol_type = other RNA
ctacagcctcaccccgctgg

SEQ ID NO: 5361 - RNA, 20 nt, synthetic construct
  misc_feature 1..20: note = spacer sequence
  source 1..20: mol_type = other RNA
agactgcaccaccgcactcc

SEQ ID NO: 5362 - RNA, 20 nt, synthetic construct
  misc_feature 1..20: note = spacer sequence
  source 1..20: mol_type = other RNA
tgactcactacagcctcacc

SEQ ID NO: 5363 - RNA, 20 nt, synthetic construct
  misc_feature 1..20: note = spacer sequence
  source 1..20: mol_type = other RNA
agcccgggcgacagagcaac

SEQ ID NO: 5364 - RNA, 20 nt, synthetic construct
  misc_feature 1..20: note = spacer sequence
  source 1..20: mol_type = other RNA
cccgggctggagtgcggtgg

SEQ ID NO: 5365 - RNA, 20 nt, synthetic construct
  misc_feature 1..20: note = spacer sequence
  source 1..20: mol_type = other RNA
gtcgcccgggctggagtgcg

SEQ ID NO: 5366 - RNA, 20 nt, synthetic construct
  misc_feature 1..20: note = spacer sequence
  source 1..20: mol_type = other RNA
atctaaaaaaaaaaaaattt

SEQ ID NO: 5367 - RNA, 20 nt, synthetic construct
  misc_feature 1..20: note = spacer sequence
  source 1..20: mol_type = other RNA
aaaaaaaaaaaaatttctgg

SEQ ID NO: 5368 - RNA, 20 nt, synthetic construct
  misc_feature 1..20: note = spacer sequence
  source 1..20: mol_type = other RNA
ggtctacctttttgcccacc

SEQ ID NO: 5369 - RNA, 20 nt, synthetic construct
  misc_feature 1..20: note = spacer sequence
  source 1..20: mol_type = other RNA
acctttttgcccacctttta

SEQ ID NO: 5370 - RNA, 20 nt, synthetic construct
  misc_feature 1..20: note = spacer sequence
  source 1..20: mol_type = other RNA
gtggttaaaaggtgggcaaa

SEQ ID NO: 5371 - RNA, 20 nt, synthetic construct
  misc_feature 1..20: note = spacer sequence
  source 1..20: mol_type = other RNA
ccaaacatgaattttcactc

SEQ ID NO: 5372 - RNA, 20 nt, synthetic construct
  misc_feature 1..20: note = spacer sequence
  source 1..20: mol_type = other RNA
tgtttggggacctctgtggt

SEQ ID NO: 5373 - RNA, 20 nt, synthetic construct
  misc_feature 1..20: note = spacer sequence
  source 1..20: mol_type = other RNA
ctctcaggaaggctgaaatg

SEQ ID NO: 5374 - RNA, 20 nt, synthetic construct
  misc_feature 1..20: note = spacer sequence
  source 1..20: mol_type = other RNA
caggaaggctgaaatgacac

SEQ ID NO: 5375 - RNA, 20 nt, synthetic construct
  misc_feature 1..20: note = spacer sequence
  source 1..20: mol_type = other RNA
ggaaggctgaaatgacacat

SEQ ID NO: 5376 - RNA, 20 nt, synthetic construct
  misc_feature 1..20: note = spacer sequence
  source 1..20: mol_type = other RNA
tgagagtgaaaattcatgtt

SEQ ID NO: 5377 - RNA, 20 nt, synthetic construct
  misc_feature 1..20: note = spacer sequence
  source 1..20: mol_type = other RNA
gccttcctgagagtgaaaat

SEQ ID NO: 5378 - RNA, 20 nt, synthetic construct
  misc_feature 1..20: note = spacer sequence
  source 1..20: mol_type = other RNA
tttcagccttcctgagagtg

SEQ ID NO: 5379 - RNA, 20 nt, synthetic construct
  misc_feature 1..20: note = spacer sequence
  source 1..20: mol_type = other RNA
tctgcacgtgccgccatctg

SEQ ID NO: 5380 - RNA, 20 nt, synthetic construct
  misc_feature 1..20: note = spacer sequence
  source 1..20: mol_type = other RNA
gcacgtgccgccatctgatt

SEQ ID NO: 5381 - RNA, 20 nt, synthetic construct
  misc_feature 1..20: note = spacer sequence
  source 1..20: mol_type = other RNA
gatttaaggcatctattcct

SEQ ID NO: 5382 - RNA, 20 nt, synthetic construct
  misc_feature 1..20: note = spacer sequence
  source 1..20: mol_type = other RNA
gatggcggcacgtgcagatg

SEQ ID NO: 5383 - RNA, 20 nt, synthetic construct
  misc_feature 1..20: note = spacer sequence
  source 1..20: mol_type = other RNA
attcctcctcaccattcctg

SEQ ID NO: 5384 - RNA, 20 nt, synthetic construct
  misc_feature 1..20: note = spacer sequence
  source 1..20: mol_type = other RNA
tcctcaccattcctgacaaa

SEQ ID NO: 5385 - RNA, 20 nt, synthetic construct
  misc_feature 1..20: note = spacer sequence
  source 1..20: mol_type = other RNA
tcaccattcctgacaaagtt

SEQ ID NO: 5386 - RNA, 20 nt, synthetic construct
  misc_feature 1..20: note = spacer sequence
  source 1..20: mol_type = other RNA
ccattcctgacaaagttgaa

SEQ ID NO: 5387 - RNA, 20 nt, synthetic construct
  misc_feature 1..20: note = spacer sequence
  source 1..20: mol_type = other RNA
tgacaaagttgaactgtcta

SEQ ID NO: 5388 - RNA, 20 nt, synthetic construct
  misc_feature 1..20: note = spacer sequence
  source 1..20: mol_type = other RNA
ggaatggtgaggaggaatag

SEQ ID NO: 5389 - RNA, 20 nt, synthetic construct
  misc_feature 1..20: note = spacer sequence
  source 1..20: mol_type = other RNA
actttgtcaggaatggtgag

SEQ ID NO: 5390 - RNA, 20 nt, synthetic construct
  misc_feature 1..20: note = spacer sequence
  source 1..20: mol_type = other RNA
acatgtgccacattctcctc

SEQ ID NO: 5391 - RNA, 20 nt, synthetic construct
  misc_feature 1..20: note = spacer sequence
  source 1..20: mol_type = other RNA
cctctttctctaattccttc

SEQ ID NO: 5392 - RNA, 20 nt, synthetic construct
  misc_feature 1..20: note = spacer sequence
  source 1..20: mol_type = other RNA
tctttctctaattccttccc

SEQ ID NO: 5393 - RNA, 20 nt, synthetic construct
  misc_feature 1..20: note = spacer sequence
  source 1..20: mol_type = other RNA
ttctctaattccttccctcc

SEQ ID NO: 5394 - RNA, 20 nt, synthetic construct
  misc_feature 1..20: note = spacer sequence
  source 1..20: mol_type = other RNA
ctaattccttccctccttcc

SEQ ID NO: 5395 - RNA, 20 nt, synthetic construct
  misc_feature 1..20: note = spacer sequence
  source 1..20: mol_type = other RNA
aattccttccctccttccct

SEQ ID NO: 5396 - RNA, 20 nt, synthetic construct
  misc_feature 1..20: note = spacer sequence
  source 1..20: mol_type = other RNA
ttccctccttccctcctccc

SEQ ID NO: 5397 - RNA, 20 nt, synthetic construct
  misc_feature 1..20: note = spacer sequence
  source 1..20: mol_type = other RNA
ctccttccctcctccctttc

SEQ ID NO: 5398 - RNA, 20 nt, synthetic construct
  misc_feature 1..20: note = spacer sequence
  source 1..20: mol_type = other RNA
ttccctcctccctttcttcc

SEQ ID NO: 5399 - RNA, 20 nt, synthetic construct
  misc_feature 1..20: note = spacer sequence
  source 1..20: mol_type = other RNA
ctcctccctttcttccctcc

SEQ ID NO: 5400 - RNA, 20 nt, synthetic construct
  misc_feature 1..20: note = spacer sequence
  source 1..20: mol_type = other RNA
tccctttcttccctccctcc

SEQ ID NO: 5401 - RNA, 20 nt, synthetic construct
  misc_feature 1..20: note = spacer sequence
  source 1..20: mol_type = other RNA
ctttcttccctccctccctc

SEQ ID NO: 5402 - RNA, 20 nt, synthetic construct
  misc_feature 1..20: note = spacer sequence
  source 1..20: mol_type = other RNA
tccctccctccctccttcct

SEQ ID NO: 5403 - RNA, 20 nt, synthetic construct
  misc_feature 1..20: note = spacer sequence
  source 1..20: mol_type = other RNA
ctccctccctccttccttct

SEQ ID NO: 5404 - RNA, 20 nt, synthetic construct
  misc_feature 1..20: note = spacer sequence
  source 1..20: mol_type = other RNA
ctccctccttccttcttctt

SEQ ID NO: 5405 - RNA, 20 nt, synthetic construct
  misc_feature 1..20: note = spacer sequence
  source 1..20: mol_type = other RNA
ctccttccttcttctttctc

SEQ ID NO: 5406 - RNA, 20 nt, synthetic construct
  misc_feature 1..20: note = spacer sequence
  source 1..20: mol_type = other RNA
ttccttcttctttctctttc

SEQ ID NO: 5407 - RNA, 20 nt, synthetic construct
  misc_feature 1..20: note = spacer sequence
  source 1..20: mol_type = other RNA
ttcttctttctctttctttt

SEQ ID NO: 5408 - RNA, 20 nt, synthetic construct
  misc_feature 1..20: note = spacer sequence
  source 1..20: mol_type = other RNA
tctttctctttctttttctt

SEQ ID NO: 5409 - RNA, 20 nt, synthetic construct
  misc_feature 1..20: note = spacer sequence
  source 1..20: mol_type = other RNA
ttctctttctttttctttct

SEQ ID NO: 5410 - RNA, 20 nt, synthetic construct
  misc_feature 1..20: note = spacer sequence
  source 1..20: mol_type = other RNA
ctttctttttctttctctct

SEQ ID NO: 5411 - RNA, 20 nt, synthetic construct
  misc_feature 1..20: note = spacer sequence
  source 1..20: mol_type = other RNA
ttctttttctttctctcttt

SEQ ID NO: 5412 - RNA, 20 nt, synthetic construct
  misc_feature 1..20: note = spacer sequence
  source 1..20: mol_type = other RNA
ttttctttctctctttctct

SEQ ID NO: 5413 - RNA, 20 nt, synthetic construct
  misc_feature 1..20: note = spacer sequence
  source 1..20: mol_type = other RNA
ttctctctttctctttcttt

SEQ ID NO: 5414 - RNA, 20 nt, synthetic construct
  misc_feature 1..20: note = spacer sequence
  source 1..20: mol_type = other RNA
ctctttctctttctttctct

SEQ ID NO: 5415 - RNA, 20 nt, synthetic construct
  misc_feature 1..20: note = spacer sequence
  source 1..20: mol_type = other RNA
ctttctctttctttctcttt

SEQ ID NO: 5416 - RNA, 20 nt, synthetic construct
  misc_feature 1..20: note = spacer sequence
  source 1..20: mol_type = other RNA
ttctctttctttctctttct

SEQ ID NO: 5417 - RNA, 20 nt, synthetic construct
  misc_feature 1..20: note = spacer sequence
  source 1..20: mol_type = other RNA
ctttctttctctttctctct

SEQ ID NO: 5418 - RNA, 20 nt, synthetic construct
  misc_feature 1..20: note = spacer sequence
  source 1..20: mol_type = other RNA
ttctttctctttctctctca

SEQ ID NO: 5419 - RNA, 20 nt, synthetic construct
  misc_feature 1..20: note = spacer sequence
  source 1..20: mol_type = other RNA
ttctctttctctctcactct

SEQ ID NO: 5420 - RNA, 20 nt, synthetic construct
  misc_feature 1..20: note = spacer sequence
  source 1..20: mol_type = other RNA
ctttctctctcactctcttt

SEQ ID NO: 5421 - RNA, 20 nt, synthetic construct
  misc_feature 1..20: note = spacer sequence
  source 1..20: mol_type = other RNA
ttctctctcactctcttttc

SEQ ID NO: 5422 - RNA, 20 nt, synthetic construct
  misc_feature 1..20: note = spacer sequence
  source 1..20: mol_type = other RNA
ctctcactctcttttcttct

SEQ ID NO: 5423 - RNA, 20 nt, synthetic construct
  misc_feature 1..20: note = spacer sequence
  source 1..20: mol_type = other RNA
ctcactctcttttcttcttt

SEQ ID NO: 5424 - RNA, 20 nt, synthetic construct
  misc_feature 1..20: note = spacer sequence
  source 1..20: mol_type = other RNA
cactctcttttcttctttct

SEQ ID NO: 5425 - RNA, 20 nt, synthetic construct
  misc_feature 1..20: note = spacer sequence
  source 1..20: mol_type = other RNA
ctctcttttcttctttctga

SEQ ID NO: 5426 - RNA, 20 nt, synthetic construct
  misc_feature 1..20: note = spacer sequence
  source 1..20: mol_type = other RNA
cttttcttctttctgacagg

SEQ ID NO: 5427 - RNA, 20 nt, synthetic construct
  misc_feature 1..20: note = spacer sequence
  source 1..20: mol_type = other RNA
tttcttctttctgacagggt

SEQ ID NO: 5428 - RNA, 20 nt, synthetic construct
  misc_feature 1..20: note = spacer sequence
  source 1..20: mol_type = other RNA
tctttctgacagggtttgcc

SEQ ID NO: 5429 - RNA, 20 nt, synthetic construct
  misc_feature 1..20: note = spacer sequence
  source 1..20: mol_type = other RNA
ttctgacagggtttgcctgt

SEQ ID NO: 5430 - RNA, 20 nt, synthetic construct
  misc_feature 1..20: note = spacer sequence
  source 1..20: mol_type = other RNA
gacagggtttgcctgttctg

SEQ ID NO: 5431 - RNA, 20 nt, synthetic construct
  misc_feature 1..20: note = spacer sequence
  source 1..20: mol_type = other RNA
gaaagaagaaaagagagtga

SEQ ID NO: 5432 - RNA, 20 nt, synthetic construct
  misc_feature 1..20: note = spacer sequence
  source 1..20: mol_type = other RNA
gcttctttaaaccctggggt

SEQ ID NO: 5433 - RNA, 20 nt, synthetic construct
  misc_feature 1..20: note = spacer sequence
  source 1..20: mol_type = other RNA
ttaaaccctggggttcaagt

SEQ ID NO: 5434 - RNA, 20 nt, synthetic construct
  misc_feature 1..20: note = spacer sequence
  source 1..20: mol_type = other RNA
agtgcaaaggtccctctcat

SEQ ID NO: 5435 - RNA, 20 nt, synthetic construct
  misc_feature 1..20: note = spacer sequence
  source 1..20: mol_type = other RNA
ctctcatctgatttccctat

SEQ ID NO: 5436 - RNA, 20 nt, synthetic construct
  misc_feature 1..20: note = spacer sequence
  source 1..20: mol_type = other RNA
catctgatttccctatttta

SEQ ID NO: 5437 - RNA, 20 nt, synthetic construct
  misc_feature 1..20: note = spacer sequence
  source 1..20: mol_type = other RNA
tctgatttccctattttatt

SEQ ID NO: 5438 - RNA, 20 nt, synthetic construct
  misc_feature 1..20: note = spacer sequence
  source 1..20: mol_type = other RNA
gatttccctattttatttta

SEQ ID NO: 5439 - RNA, 20 nt, synthetic construct
  misc_feature 1..20: note = spacer sequence
  source 1..20: mol_type = other RNA
gatgagagggacctttgcac

SEQ ID NO: 5440 - RNA, 20 nt, synthetic construct
  misc_feature 1..20: note = spacer sequence
  source 1..20: mol_type = other RNA
ctattttattttatttaagt

SEQ ID NO: 5441 - RNA, 20 nt, synthetic construct
  misc_feature 1..20: note = spacer sequence
  source 1..20: mol_type = other RNA
aacttaaataaaataaaata

SEQ ID NO: 5442 - RNA, 20 nt, synthetic construct
  misc_feature 1..20: note = spacer sequence
  source 1..20: mol_type = other RNA
acgatgatgatgatgattat

SEQ ID NO: 5443 - RNA, 20 nt, synthetic construct
  misc_feature 1..20: note = spacer sequence
  source 1..20: mol_type = other RNA
tggagtatctaacttaaata

SEQ ID NO: 5444 - RNA, 20 nt, synthetic construct
  misc_feature 1..20: note = spacer sequence
  source 1..20: mol_type = other RNA
tcgtggagtatctaacttaa

SEQ ID NO: 5445 - RNA, 20 nt, synthetic construct
  misc_feature 1..20: note = spacer sequence
  source 1..20: mol_type = other RNA
tcatcgtggagtatctaact

SEQ ID NO: 5446 - RNA, 20 nt, synthetic construct
  misc_feature 1..20: note = spacer sequence
  source 1..20: mol_type = other RNA
tcatcatcgtggagtatcta

SEQ ID NO: 5447 - RNA, 20 nt, synthetic construct
  misc_feature 1..20: note = spacer sequence
  source 1..20: mol_type = other RNA
tcatcatcatcgtggagtat

SEQ ID NO: 5448 - RNA, 20 nt, synthetic construct
  misc_feature 1..20: note = spacer sequence
  source 1..20: mol_type = other RNA
acaataatcatcatcatcat

SEQ ID NO: 5449 - RNA, 20 nt, synthetic construct
  misc_feature 1..20: note = spacer sequence
  source 1..20: mol_type = other RNA
caacaataatcatcatcatc

SEQ ID NO: 5450 - RNA, 20 nt, synthetic construct
  misc_feature 1..20: note = spacer sequence
  source 1..20: mol_type = other RNA
tgtctcaacaataatcatca

SEQ ID NO: 5451 - RNA, 20 nt, synthetic construct
  misc_feature 1..20: note = spacer sequence
  source 1..20: mol_type = other RNA
ttctgttgcccaggctggag

SEQ ID NO: 5452 - RNA, 20 nt, synthetic construct
  misc_feature 1..20: note = spacer sequence
  source 1..20: mol_type = other RNA
gttgcccaggctggagtgca

SEQ ID NO: 5453 - RNA, 20 nt, synthetic construct
  misc_feature 1..20: note = spacer sequence
  source 1..20: mol_type = other RNA
agcctgggcaacagaatgaa

SEQ ID NO: 5454 - RNA, 20 nt, synthetic construct
  misc_feature 1..20: note = spacer sequence
  source 1..20: mol_type = other RNA
caccattgcactccagcctg

SEQ ID NO: 5455 - RNA, 20 nt, synthetic construct
  misc_feature 1..20: note = spacer sequence
  source 1..20: mol_type = other RNA
caactcactgcagcctcaac

SEQ ID NO: 5456 - RNA, 20 nt, synthetic construct
  misc_feature 1..20: note = spacer sequence
  source 1..20: mol_type = other RNA
ctgcagcctcaacctcctgg

SEQ ID NO: 5457 - RNA, 20 nt, synthetic construct
  misc_feature 1..20: note = spacer sequence
  source 1..20: mol_type = other RNA
acctcctgggcccacgcgat

SEQ ID NO: 5458 - RNA, 20 nt, synthetic construct
  misc_feature 1..20: note = spacer sequence
  source 1..20: mol_type = other RNA
tgggcccacgcgatcctcct

SEQ ID NO: 5459 - RNA, 20 nt, synthetic construct
  misc_feature 1..20: note = spacer sequence
  source 1..20: mol_type = other RNA
cgtgggcccaggaggttgag

SEQ ID NO: 5460 - RNA, 20 nt, synthetic construct
  misc_feature 1..20: note = spacer sequence
  source 1..20: mol_type = other RNA
tcctacctcagcctcccaag

SEQ ID NO: 5461 - RNA, 20 nt, synthetic construct
  misc_feature 1..20: note = spacer sequence
  source 1..20: mol_type = other RNA
tacctcagcctcccaagtag

SEQ ID NO: 5462 - RNA, 20 nt, synthetic construct
  misc_feature 1..20: note = spacer sequence
  source 1..20: mol_type = other RNA
gcctcccaagtagcttggac

SEQ ID NO: 5463 - RNA, 20 nt, synthetic construct
  misc_feature 1..20: note = spacer sequence
  source 1..20: mol_type = other RNA
caagtagcttggactacagg

SEQ ID NO: 5464 - RNA, 20 nt, synthetic construct
  misc_feature 1..20: note = spacer sequence
  source 1..20: mol_type = other RNA
aagctacttgggaggctgag

SEQ ID NO: 5465 - RNA, 20 nt, synthetic construct
  misc_feature 1..20: note = spacer sequence
  source 1..20: mol_type = other RNA
ggcacatgtaattagccggg

SEQ ID NO: 5466 - RNA, 20 nt, synthetic construct
  misc_feature 1..20: note = spacer sequence
  source 1..20: mol_type = other RNA
acccacgttccagggttcca

SEQ ID NO: 5467 - RNA, 20 nt, synthetic construct
  misc_feature 1..20: note = spacer sequence
  source 1..20: mol_type = other RNA
agggttccaaacaaccaagg

SEQ ID NO: 5468 - RNA, 20 nt, synthetic construct
  misc_feature 1..20: note = spacer sequence
  source 1..20: mol_type = other RNA
aaacaaccaaggctctatca

SEQ ID NO: 5469 - RNA, 20 nt, synthetic construct
  misc_feature 1..20: note = spacer sequence
  source 1..20: mol_type = other RNA
atcatcctgtcttaacaaat

SEQ ID NO: 5470 - RNA, 20 nt, synthetic construct
  misc_feature 1..20: note = spacer sequence
  source 1..20: mol_type = other RNA
tcctgtcttaacaaatatac

SEQ ID NO: 5471 - RNA, 20 nt, synthetic construct
  misc_feature 1..20: note = spacer sequence
  source 1..20: mol_type = other RNA
tgtcttaacaaatatacctt

SEQ ID NO: 5472 - RNA, 20 nt, synthetic construct
  misc_feature 1..20: note = spacer sequence
  source 1..20: mol_type = other RNA
taacaaatataccttcataa

SEQ ID NO: 5473 - RNA, 20 nt, synthetic construct
  misc_feature 1..20: note = spacer sequence
  source 1..20: mol_type = other RNA
taaagacctggaaggcaggt

SEQ ID NO: 5474 - RNA, 20 nt, synthetic construct
  misc_feature 1..20: note = spacer sequence
  source 1..20: mol_type = other RNA
ttatgaaggtatatttgtta

SEQ ID NO: 5475 - RNA, 20 nt, synthetic construct
  misc_feature 1..20: note = spacer sequence
  source 1..20: mol_type = other RNA
aggtctttatgaaggtatat

SEQ ID NO: 5476 - RNA, 20 nt, synthetic construct
  misc_feature 1..20: note = spacer sequence
  source 1..20: mol_type = other RNA
acctgccttccaggtcttta

SEQ ID NO: 5477 - RNA, 20 nt, synthetic construct
  misc_feature 1..20: note = spacer sequence
  source 1..20: mol_type = other RNA
acatttcaacctgccttcca

SEQ ID NO: 5478 - RNA, 20 nt, synthetic construct
  misc_feature 1..20: note = spacer sequence
  source 1..20: mol_type = other RNA
tggacttctttcagttctac

SEQ ID NO: 5479 - RNA, 20 nt, synthetic construct
  misc_feature 1..20: note = spacer sequence
  source 1..20: mol_type = other RNA
aagaattccacatttcaacc

SEQ ID NO: 5480 - RNA, 20 nt, synthetic construct
  misc_feature 1..20: note = spacer sequence
  source 1..20: mol_type = other RNA
ttcagttctacgtagaaggg

SEQ ID NO: 5481 - RNA, 20 nt, synthetic construct
  misc_feature 1..20: note = spacer sequence
  source 1..20: mol_type = other RNA
gttctacgtagaagggtagc

SEQ ID NO: 5482 - RNA, 20 nt, synthetic construct
  misc_feature 1..20: note = spacer sequence
  source 1..20: mol_type = other RNA
acgtagaagggtagcagtgg

SEQ ID NO: 5483 - RNA, 20 nt, synthetic construct
  misc_feature 1..20: note = spacer sequence
  source 1..20: mol_type = other RNA
acgtagaactgaaagaagtc

SEQ ID NO: 5484 - RNA, 20 nt, synthetic construct
  misc_feature 1..20: note = spacer sequence
  source 1..20: mol_type = other RNA
actgctacccttctacgtag

SEQ ID NO: 5485 - RNA, 20 nt, synthetic construct
  misc_feature 1..20: note = spacer sequence
  source 1..20: mol_type = other RNA
ccactgctacccttctacgt

SEQ ID NO: 5486 - RNA, 20 nt, synthetic construct
  misc_feature 1..20: note = spacer sequence
  source 1..20: mol_type = other RNA
tcctttccccacccctgctc

SEQ ID NO: 5487 - RNA, 20 nt, synthetic construct
  misc_feature 1..20: note = spacer sequence
  source 1..20: mol_type = other RNA
tttccccacccctgctcctt

SEQ ID NO: 5488 - RNA, 20 nt, synthetic construct
  misc_feature 1..20: note = spacer sequence
  source 1..20: mol_type = other RNA
ccacccctgctccttgtggc

SEQ ID NO: 5489 - RNA, 20 nt, synthetic construct
  misc_feature 1..20: note = spacer sequence
  source 1..20: mol_type = other RNA
ttgtggcactgggcagggcc

SEQ ID NO: 5490 - RNA, 20 nt, synthetic construct
  misc_feature 1..20: note = spacer sequence
  source 1..20: mol_type = other RNA
aggctagcagtgtactcaac

SEQ ID NO: 5491 - RNA, 20 nt, synthetic construct
  misc_feature 1..20: note = spacer sequence
  source 1..20: mol_type = other RNA
acaagggacagtccctgtgt

SEQ ID NO: 5492 - RNA, 20 nt, synthetic construct
  misc_feature 1..20: note = spacer sequence
  source 1..20: mol_type = other RNA
cttgttgagtacactgctag

SEQ ID NO: 5493 - RNA, 20 nt, synthetic construct
  misc_feature 1..20: note = spacer sequence
  source 1..20: mol_type = other RNA
ctgtgtggcctgttcaggat

SEQ ID NO: 5494 - RNA, 20 nt, synthetic construct
  misc_feature 1..20: note = spacer sequence
  source 1..20: mol_type = other RNA
ggatcctatacacaggctca

SEQ ID NO: 5495 - RNA, 20 nt, synthetic construct
  misc_feature 1..20: note = spacer sequence
  source 1..20: mol_type = other RNA
tgaacaggccacacagggac

SEQ ID NO: 5496 - RNA, 20 nt, synthetic construct
  misc_feature 1..20: note = spacer sequence
  source 1..20: mol_type = other RNA
tatacacaggctcagggctc

SEQ ID NO: 5497 - RNA, 20 nt, synthetic construct
  misc_feature 1..20: note = spacer sequence
  source 1..20: mol_type = other RNA
gggctctttgggcaggaaat

SEQ ID NO: 5498 - RNA, 20 nt, synthetic construct
  misc_feature 1..20: note = spacer sequence
  source 1..20: mol_type = other RNA
ttgggcaggaaattccagga

SEQ ID NO: 5499 - RNA, 20 nt, synthetic construct
  misc_feature 1..20: note = spacer sequence
  source 1..20: mol_type = other RNA
tgcccaaagagccctgagcc

SEQ ID NO: 5500 - RNA, 20 nt, synthetic construct
  misc_feature 1..20: note = spacer sequence
  source 1..20: mol_type = other RNA
aggatccgggtactcaagtg

SEQ ID NO: 5501 - RNA, 20 nt, synthetic construct
  misc_feature 1..20: note = spacer sequence
  source 1..20: mol_type = other RNA
tggaatttcctgcccaaaga

SEQ ID NO: 5502 - RNA, 20 nt, synthetic construct
  misc_feature 1..20: note = spacer sequence
  source 1..20: mol_type = other RNA
gggtactcaagtggtgttct

SEQ ID NO: 5503 - RNA, 20 nt, synthetic construct
  misc_feature 1..20: note = spacer sequence
  source 1..20: mol_type = other RNA
agtggtgttctaaacagtgg

SEQ ID NO: 5504 - RNA, 20 nt, synthetic construct
  misc_feature 1..20: note = spacer sequence
  source 1..20: mol_type = other RNA
aaacagtggttcttggccgg

SEQ ID NO: 5505 - RNA, 20 nt, synthetic construct
  misc_feature 1..20: note = spacer sequence
  source 1..20: mol_type = other RNA
tggccgggtgtggtggctca

SEQ ID NO: 5506 - RNA, 20 nt, synthetic construct
  misc_feature 1..20: note = spacer sequence
  source 1..20: mol_type = other RNA
cacctgtaatcccagcactt

SEQ ID NO: 5507 - RNA, 20 nt, synthetic construct
  misc_feature 1..20: note = spacer sequence
  source 1..20: mol_type = other RNA
cagcactttgggaggccgag

SEQ ID NO: 5508 - RNA, 20 nt, synthetic construct
  misc_feature 1..20: note = spacer sequence
  source 1..20: mol_type = other RNA
caaagtgctgggattacagg

SEQ ID NO: 5509 - RNA, 20 nt, synthetic construct
  misc_feature 1..20: note = spacer sequence
  source 1..20: mol_type = other RNA
gcctcccaaagtgctgggat

SEQ ID NO: 5510 - RNA, 20 nt, synthetic construct
  misc_feature 1..20: note = spacer sequence
  source 1..20: mol_type = other RNA
gccagcctcggcctcccaaa

SEQ ID NO: 5511 - RNA, 20 nt, synthetic construct
  misc_feature 1..20: note = spacer sequence
  source 1..20: mol_type = other RNA
cttgaggtcaggagttcgag

SEQ ID NO: 5512 - RNA, 20 nt, synthetic construct
  misc_feature 1..20: note = spacer sequence
  source 1..20: mol_type = other RNA
agtgatctgccagcctcggc

SEQ ID NO: 5513 - RNA, 20 nt, synthetic construct
  misc_feature 1..20: note = spacer sequence
  source 1..20: mol_type = other RNA
ggagttcgagaccagcctgg

SEQ ID NO: 5514 - RNA, 20 nt, synthetic construct
  misc_feature 1..20: note = spacer sequence
  source 1..20: mol_type = other RNA
tgacctcaagtgatctgcca

SEQ ID NO: 5515 - RNA, 20 nt, synthetic construct
  misc_feature 1..20: note = spacer sequence
  source 1..20: mol_type = other RNA
agaccagcctggccaacatg

SEQ ID NO: 5516 - RNA, 20 nt, synthetic construct
  misc_feature 1..20: note = spacer sequence
  source 1..20: mol_type = other RNA
aactcctgacctcaagtgat

SEQ ID NO: 5517 - RNA, 20 nt, synthetic construct
  misc_feature 1..20: note = spacer sequence
  source 1..20: mol_type = other RNA
cgaactcctgacctcaagtg

SEQ ID NO: 5518 - RNA, 20 nt, synthetic construct
  misc_feature 1..20: note = spacer sequence
  source 1..20: mol_type = other RNA
ccatgttggccaggctggtc

SEQ ID NO: 5519 - RNA, 20 nt, synthetic construct
  misc_feature 1..20: note = spacer sequence
  source 1..20: mol_type = other RNA
ctactaaaaatacaaaaact

SEQ ID NO: 5520 - RNA, 20 nt, synthetic construct
  misc_feature 1..20: note = spacer sequence
  source 1..20: mol_type = other RNA
actaaaaatacaaaaactta

SEQ ID NO: 5521 - RNA, 20 nt, synthetic construct
  misc_feature 1..20: note = spacer sequence
  source 1..20: mol_type = other RNA
cagctactcgggaggctgag

SEQ ID NO: 5522 - RNA, 20 nt, synthetic construct
  misc_feature 1..20: note = spacer sequence
  source 1..20: mol_type = other RNA
ggaggctgaggcaggagaat

SEQ ID NO: 5523 - RNA, 20 nt, synthetic construct
  misc_feature 1..20: note = spacer sequence
  source 1..20: mol_type = other RNA
cgagtagctgggactacagg

SEQ ID NO: 5524 - RNA, 20 nt, synthetic construct
  misc_feature 1..20: note = spacer sequence
  source 1..20: mol_type = other RNA
gcctcccgagtagctgggac

SEQ ID NO: 5525 - RNA, 20 nt, synthetic construct
  misc_feature 1..20: note = spacer sequence
  source 1..20: mol_type = other RNA
tgcctcagcctcccgagtag

SEQ ID NO: 5526 - RNA, 20 nt, synthetic construct
  misc_feature 1..20: note = spacer sequence
  source 1..20: mol_type = other RNA
cctgcctcagcctcccgagt

SEQ ID NO: 5527 - RNA, 20 nt, synthetic construct
  misc_feature 1..20: note = spacer sequence
  source 1..20: mol_type = other RNA
cttgaacccagcaggcggag

SEQ ID NO: 5528 - RNA, 20 nt, synthetic construct
  misc_feature 1..20: note = spacer sequence
  source 1..20: mol_type = other RNA
agtgattctcctgcctcagc

SEQ ID NO: 5529 - RNA, 20 nt, synthetic construct
  misc_feature 1..20: note = spacer sequence
  source 1..20: mol_type = other RNA
gcctgctgggttcaagtgat

SEQ ID NO: 5530 - RNA, 20 nt, synthetic construct
  misc_feature 1..20: note = spacer sequence
  source 1..20: mol_type = other RNA
ctgcaacctccgcctgctgg

SEQ ID NO: 5531 - RNA, 20 nt, synthetic construct
  misc_feature 1..20: note = spacer sequence
  source 1..20: mol_type = other RNA
gctcactgcaacctccgcct

SEQ ID NO: 5532 - RNA, 20 nt, synthetic construct
  misc_feature 1..20: note = spacer sequence
  source 1..20: mol_type = other RNA
cagctcactgcaacctccgc

SEQ ID NO: 5533 - RNA, 20 nt, synthetic construct
  misc_feature 1..20: note = spacer sequence
  source 1..20: mol_type = other RNA
agcctggtgacagagtgaga

SEQ ID NO: 5534 - RNA, 20 nt, synthetic construct
  misc_feature 1..20: note = spacer sequence
  source 1..20: mol_type = other RNA
ccaggctggagtgcagtggt

SEQ ID NO: 5535 - RNA, 20 nt, synthetic construct
  misc_feature 1..20: note = spacer sequence
  source 1..20: mol_type = other RNA
gtcaccaggctggagtgcag

SEQ ID NO: 5536 - RNA, 20 nt, synthetic construct
  misc_feature 1..20: note = spacer sequence
  source 1..20: mol_type = other RNA
ctctgtcaccaggctggagt

SEQ ID NO: 5537 - RNA, 20 nt, synthetic construct
  misc_feature 1..20: note = spacer sequence
  source 1..20: mol_type = other RNA
cactctgtcaccaggctgga

SEQ ID NO: 5538 - RNA, 20 nt, synthetic construct
  misc_feature 1..20: note = spacer sequence
  source 1..20: mol_type = other RNA
atatcaaaataaatacataa

SEQ ID NO: 5539 - RNA, 20 nt, synthetic construct
  misc_feature 1..20: note = spacer sequence
  source 1..20: mol_type = other RNA
aaataaatacataaataaat

SEQ ID NO: 5540 - RNA, 20 nt, synthetic construct
  misc_feature 1..20: note = spacer sequence
  source 1..20: mol_type = other RNA
ctgtttttatttatttatgt

SEQ ID NO: 5541 - RNA, 20 nt, synthetic construct
  misc_feature 1..20: note = spacer sequence
  source 1..20: mol_type = other RNA
taactgggagtgatttggca

SEQ ID NO: 5542 - RNA, 20 nt, synthetic construct
  misc_feature 1..20: note = spacer sequence
  source 1..20: mol_type = other RNA
cagttaagaatcactgtttt

SEQ ID NO: 5543 - RNA, 20 nt, synthetic construct
  misc_feature 1..20: note = spacer sequence
  source 1..20: mol_type = other RNA
ctcccagttaagaatcactg

SEQ ID NO: 5544 - RNA, 20 nt, synthetic construct
  misc_feature 1..20: note = spacer sequence
  source 1..20: mol_type = other RNA
ggaattatttttggttatcc

SEQ ID NO: 5545 - RNA, 20 nt, synthetic construct
  misc_feature 1..20: note = spacer sequence
  source 1..20: mol_type = other RNA
agacgttgccaaatcactcc

SEQ ID NO: 5546 - RNA, 20 nt, synthetic construct
  misc_feature 1..20: note = spacer sequence
  source 1..20: mol_type = other RNA
cagcctggcagggagggaca

SEQ ID NO: 5547 - RNA, 20 nt, synthetic construct
  misc_feature 1..20: note = spacer sequence
  source 1..20: mol_type = other RNA
ctgccaggctgggataacca

SEQ ID NO: 5548 - RNA, 20 nt, synthetic construct
  misc_feature 1..20: note = spacer sequence
  source 1..20: mol_type = other RNA
ctccctgccaggctgggata

SEQ ID NO: 5549 - RNA, 20 nt, synthetic construct
  misc_feature 1..20: note = spacer sequence
  source 1..20: mol_type = other RNA
agtgagtaggggctagggat

SEQ ID NO: 5550 - RNA, 20 nt, synthetic construct
  misc_feature 1..20: note = spacer sequence
  source 1..20: mol_type = other RNA
ctagatgccagtaataccct

SEQ ID NO: 5551 - RNA, 20 nt, synthetic construct
  misc_feature 1..20: note = spacer sequence
  source 1..20: mol_type = other RNA
ctagcccctactcactagat

SEQ ID NO: 5552 - RNA, 20 nt, synthetic construct
  misc_feature 1..20: note = spacer sequence
  source 1..20: mol_type = other RNA
actgaacatcctacagtgta

SEQ ID NO: 5553 - RNA, 20 nt, synthetic construct
  misc_feature 1..20: note = spacer sequence
  source 1..20: mol_type = other RNA
gtagaatccctagcccctac

SEQ ID NO: 5554 - RNA, 20 nt, synthetic construct
  misc_feature 1..20: note = spacer sequence
  source 1..20: mol_type = other RNA
tacagtgtacaggacagcct

SEQ ID NO: 5555 - RNA, 20 nt, synthetic construct
  misc_feature 1..20: note = spacer sequence
  source 1..20: mol_type = other RNA
tgtacactgtaggatgttca

SEQ ID NO: 5556 - RNA, 20 nt, synthetic construct
  misc_feature 1..20: note = spacer sequence
  source 1..20: mol_type = other RNA
acagcaaagaactgtctggc

SEQ ID NO: 5557 - RNA, 20 nt, synthetic construct
  misc_feature 1..20: note = spacer sequence
  source 1..20: mol_type = other RNA
ttgctgtggaggctgtcctg

SEQ ID NO: 5558 - RNA, 20 nt, synthetic construct
  misc_feature 1..20: note = spacer sequence
  source 1..20: mol_type = other RNA
ggcccaaaatgtccatagtg

SEQ ID NO: 5559 - RNA, 20 nt, synthetic construct
  misc_feature 1..20: note = spacer sequence
  source 1..20: mol_type = other RNA
atagtgcccacattcgatgc

SEQ ID NO: 5560 - RNA, 20 nt, synthetic construct
  misc_feature 1..20: note = spacer sequence
  source 1..20: mol_type = other RNA
atgccctgcattaggaagat

SEQ ID NO: 5561 - RNA, 20 nt, synthetic construct
  misc_feature 1..20: note = spacer sequence
  source 1..20: mol_type = other RNA
aatgtgggcactatggacat

SEQ ID NO: 5562 - RNA, 20 nt, synthetic construct
  misc_feature 1..20: note = spacer sequence
  source 1..20: mol_type = other RNA
taatgcagggcatcgaatgt

SEQ ID NO: 5563 - RNA, 20 nt, synthetic construct
  misc_feature 1..20: note = spacer sequence
  source 1..20: mol_type = other RNA
tcctaatgcagggcatcgaa

SEQ ID NO: 5564 - RNA, 20 nt, synthetic construct
  misc_feature 1..20: note = spacer sequence
  source 1..20: mol_type = other RNA
taaatatcacagagttaaat

SEQ ID NO: 5565 - RNA, 20 nt, synthetic construct
  misc_feature 1..20: note = spacer sequence
  source 1..20: mol_type = other RNA
cagagttaaattccttaccc

SEQ ID NO: 5566 - RNA, 20 nt, synthetic construct
  misc_feature 1..20: note = spacer sequence
  source 1..20: mol_type = other RNA
gtgatatttaagagtattta

SEQ ID NO: 5567 - RNA, 20 nt, synthetic construct
  misc_feature 1..20: note = spacer sequence
  source 1..20: mol_type = other RNA
ttacccctgttctagcagag

SEQ ID NO: 5568 - RNA, 20 nt, synthetic construct
  misc_feature 1..20: note = spacer sequence
  source 1..20: mol_type = other RNA
agcagagatgatattcttgc

SEQ ID NO: 5569 - RNA, 20 nt, synthetic construct
  misc_feature 1..20: note = spacer sequence
  source 1..20: mol_type = other RNA
gctagaacaggggtaaggaa

SEQ ID NO: 5570 - RNA, 20 nt, synthetic construct
  misc_feature 1..20: note = spacer sequence
  source 1..20: mol_type = other RNA
ctgctagaacaggggtaagg

SEQ ID NO: 5571 - RNA, 20 nt, synthetic construct
  misc_feature 1..20: note = spacer sequence
  source 1..20: mol_type = other RNA
tctctgctagaacaggggta

SEQ ID NO: 5572 - RNA, 20 nt, synthetic construct
  misc_feature 1..20: note = spacer sequence
  source 1..20: mol_type = other RNA
tgcggggggagcatcttctt

SEQ ID NO: 5573 - RNA, 20 nt, synthetic construct
  misc_feature 1..20: note = spacer sequence
  source 1..20: mol_type = other RNA
ccccgcaagaatatcatctc

SEQ ID NO: 5574 - RNA, 20 nt, synthetic construct
  misc_feature 1..20: note = spacer sequence
  source 1..20: mol_type = other RNA
tcttggcttcaacacattct

SEQ ID NO: 5575 - RNA, 20 nt, synthetic construct
  misc_feature 1..20: note = spacer sequence
  source 1..20: mol_type = other RNA
tggcttcaacacattctttt

SEQ ID NO: 5576 - RNA, 20 nt, synthetic construct
  misc_feature 1..20: note = spacer sequence
  source 1..20: mol_type = other RNA
acacattcttttctccatgg

SEQ ID NO: 5577 - RNA, 20 nt, synthetic construct
  misc_feature 1..20: note = spacer sequence
  source 1..20: mol_type = other RNA
tttctccatgggagatgatg

SEQ ID NO: 5578 - RNA, 20 nt, synthetic construct
  misc_feature 1..20: note = spacer sequence
  source 1..20: mol_type = other RNA
ccatgggagatgatgccaga

SEQ ID NO: 5579 - RNA, 20 nt, synthetic construct
  misc_feature 1..20: note = spacer sequence
  source 1..20: mol_type = other RNA
atgggagatgatgccagaag

SEQ ID NO: 5580 - RNA, 20 nt, synthetic construct
  misc_feature 1..20: note = spacer sequence
  source 1..20: mol_type = other RNA
catggagaaaagaatgtgtt

SEQ ID NO: 5581 - RNA, 20 nt, synthetic construct
  misc_feature 1..20: note = spacer sequence
  source 1..20: mol_type = other RNA
cccatggagaaaagaatgtg

SEQ ID NO: 5582 - RNA, 20 nt, synthetic construct
  misc_feature 1..20: note = spacer sequence
  source 1..20: mol_type = other RNA
tctcccatggagaaaagaat

SEQ ID NO: 5583 - RNA, 20 nt, synthetic construct
  misc_feature 1..20: note = spacer sequence
  source 1..20: mol_type = other RNA
ggcatcatctcccatggaga

SEQ ID NO: 5584 - RNA, 20 nt, synthetic construct
  misc_feature 1..20: note = spacer sequence
  source 1..20: mol_type = other RNA
tctggcatcatctcccatgg

SEQ ID NO: 5585 - RNA, 20 nt, synthetic construct
  misc_feature 1..20: note = spacer sequence
  source 1..20: mol_type = other RNA
ctcttctggcatcatctccc

SEQ ID NO: 5586 - RNA, 20 nt, synthetic construct
  misc_feature 1..20: note = spacer sequence
  source 1..20: mol_type = other RNA
gtccctcttctggcatcatc

SEQ ID NO: 5587 - RNA, 20 nt, synthetic construct
  misc_feature 1..20: note = spacer sequence
  source 1..20: mol_type = other RNA
ctggccccaggccccatgct

SEQ ID NO: 5588 - RNA, 20 nt, synthetic construct
  misc_feature 1..20: note = spacer sequence
  source 1..20: mol_type = other RNA
ggtgtgacgaccatcctacg

SEQ ID NO: 5589 - RNA, 20 nt, synthetic construct
  misc_feature 1..20: note = spacer sequence
  source 1..20: mol_type = other RNA
cacctgaacaagggggtccc

SEQ ID NO: 5590 - RNA, 20 nt, synthetic construct
  misc_feature 1..20: note = spacer sequence
  source 1..20: mol_type = other RNA
tcacacctgaacaagggggt

SEQ ID NO: 5591 - RNA, 20 nt, synthetic construct
  misc_feature 1..20: note = spacer sequence
  source 1..20: mol_type = other RNA
tacgaaggcaccacccaggc

SEQ ID NO: 5592 - RNA, 20 nt, synthetic construct
  misc_feature 1..20: note = spacer sequence
  source 1..20: mol_type = other RNA
taggatggtcgtcacacctg

SEQ ID NO: 5593 - RNA, 20 nt, synthetic construct
  misc_feature 1..20: note = spacer sequence
  source 1..20: mol_type = other RNA
ttagaccgtctcaaaagaag

SEQ ID NO: 5594 - RNA, 20 nt, synthetic construct
  misc_feature 1..20: note = spacer sequence
  source 1..20: mol_type = other RNA
aatgatgcctgggtggtgcc

SEQ ID NO: 5595 - RNA, 20 nt, synthetic construct
  misc_feature 1..20: note = spacer sequence
  source 1..20: mol_type = other RNA
caaaagaagagtaattcact

SEQ ID NO: 5596 - RNA, 20 nt, synthetic construct
  misc_feature 1..20: note = spacer sequence
  source 1..20: mol_type = other RNA
aaagaagagtaattcactgt

SEQ ID NO: 5597 - RNA, 20 nt, synthetic construct
  misc_feature 1..20: note = spacer sequence
  source 1..20: mol_type = other RNA
tttgagacggtctaatgatg

SEQ ID NO: 5598 - RNA, 20 nt, synthetic construct
  misc_feature 1..20: note = spacer sequence
  source 1..20: mol_type = other RNA
tcttttgagacggtctaatg

SEQ ID NO: 5599 - RNA, 20 nt, synthetic construct
  misc_feature 1..20: note = spacer sequence
  source 1..20: mol_type = other RNA
ctgtcccaaagcagctctct

SEQ ID NO: 5600 - RNA, 20 nt, synthetic construct
  misc_feature 1..20: note = spacer sequence
  source 1..20: mol_type = other RNA
caaagcagctctctcgtgtc

SEQ ID NO: 5601 - RNA, 20 nt, synthetic construct
  misc_feature 1..20: note = spacer sequence
  source 1..20: mol_type = other RNA
ctcgtgtctgtgggcggatc

SEQ ID NO: 5602 - RNA, 20 nt, synthetic construct
  misc_feature 1..20: note = spacer sequence
  source 1..20: mol_type = other RNA
cgtgtctgtgggcggatccc

SEQ ID NO: 5603 - RNA, 20 nt, synthetic construct
  misc_feature 1..20: note = spacer sequence
  source 1..20: mol_type = other RNA
tgtctgtgggcggatccctt

SEQ ID NO: 5604 - RNA, 20 nt, synthetic construct
  misc_feature 1..20: note = spacer sequence
  source 1..20: mol_type = other RNA
gtgggcggatcccttggcaa

SEQ ID NO: 5605 - RNA, 20 nt, synthetic construct
  misc_feature 1..20: note = spacer sequence
  source 1..20: mol_type = other RNA
gcccacagacacgagagagc

SEQ ID NO: 5606 - RNA, 20 nt, synthetic construct
  misc_feature 1..20: note = spacer sequence
  source 1..20: mol_type = other RNA
cttggcaagtttacaatgaa

SEQ ID NO: 5607 - RNA, 20 nt, synthetic construct
  misc_feature 1..20: note = spacer sequence
  source 1..20: mol_type = other RNA
ttgtaaacttgccaagggat

SEQ ID NO: 5608 - RNA, 20 nt, synthetic construct
  misc_feature 1..20: note = spacer sequence
  source 1..20: mol_type = other RNA
gttcattgtaaacttgccaa

SEQ ID NO: 5609 - RNA, 20 nt, synthetic construct
  misc_feature 1..20: note = spacer sequence
  source 1..20: mol_type = other RNA
gccgaacttcctggaaccca

SEQ ID NO: 5610 - RNA, 20 nt, synthetic construct
  misc_feature 1..20: note = spacer sequence
  source 1..20: mol_type = other RNA
gcagatttcagttcattgta

SEQ ID NO: 5611 - RNA, 20 nt, synthetic construct
  misc_feature 1..20: note = spacer sequence
  source 1..20: mol_type = other RNA
tggaacccaaagaaacttta

SEQ ID NO: 5612 - RNA, 20 nt, synthetic construct
  misc_feature 1..20: note = spacer sequence
  source 1..20: mol_type = other RNA
aggaagttcggcagatttca

SEQ ID NO: 5613 - RNA, 20 nt, synthetic construct
  misc_feature 1..20: note = spacer sequence
  source 1..20: mol_type = other RNA
ttgggttccaggaagttcgg

SEQ ID NO: 5614 - RNA, 20 nt, synthetic construct
  misc_feature 1..20: note = spacer sequence
  source 1..20: mol_type = other RNA
aaacggttgcataaacagtg

SEQ ID NO: 5615 - RNA, 20 nt, synthetic construct
  misc_feature 1..20: note = spacer sequence
  source 1..20: mol_type = other RNA
tatattctaaacggttgcat

SEQ ID NO: 5616 - RNA, 20 nt, synthetic construct
  misc_feature 1..20: note = spacer sequence
  source 1..20: mol_type = other RNA
ggagactactaccaaataca

SEQ ID NO: 5617 - RNA, 20 nt, synthetic construct
  misc_feature 1..20: note = spacer sequence
  source 1..20: mol_type = other RNA
agataattcgtatattctaa

SEQ ID NO: 5618 - RNA, 20 nt, synthetic construct
  misc_feature 1..20: note = spacer sequence
  source 1..20: mol_type = other RNA
ccagataattcgtatattct

SEQ ID NO: 5619 - RNA, 20 nt, synthetic construct
  misc_feature 1..20: note = spacer sequence
  source 1..20: mol_type = other RNA
tagaggatgataaaaaaatg

SEQ ID NO: 5620 - RNA, 20 nt, synthetic construct
  misc_feature 1..20: note = spacer sequence
  source 1..20: mol_type = other RNA
aggaagtatacatatttgca

SEQ ID NO: 5621 - RNA, 20 nt, synthetic construct
  misc_feature 1..20: note = spacer sequence
  source 1..20: mol_type = other RNA
tctaggaagtatacatattt

SEQ ID NO: 5622 - RNA, 20 nt, synthetic construct
  misc_feature 1..20: note = spacer sequence
  source 1..20: mol_type = other RNA
tcctctaggaagtatacata

SEQ ID NO: 5623 - RNA, 20 nt, synthetic construct
  misc_feature 1..20: note = spacer sequence
  source 1..20: mol_type = other RNA
catttttttatcatcctcta

SEQ ID NO: 5624 - RNA, 20 nt, synthetic construct
  misc_feature 1..20: note = spacer sequence
  source 1..20: mol_type = other RNA
ctgatagaggatgcattaga

SEQ ID NO: 5625 - RNA, 20 nt, synthetic construct
  misc_feature 1..20: note = spacer sequence
  source 1..20: mol_type = other RNA
gatagaggatgcattagagt

SEQ ID NO: 5626 - RNA, 20 nt, synthetic construct
  misc_feature 1..20: note = spacer sequence
  source 1..20: mol_type = other RNA
gagaaatacaattcacattt

SEQ ID NO: 5627 - RNA, 20 nt, synthetic construct
  misc_feature 1..20: note = spacer sequence
  source 1..20: mol_type = other RNA
atcagagaaatacaattcac

SEQ ID NO: 5628 - RNA, 20 nt, synthetic construct
  misc_feature 1..20: note = spacer sequence
  source 1..20: mol_type = other RNA
tctatcagagaaatacaatt

SEQ ID NO: 5629 - RNA, 20 nt, synthetic construct
  misc_feature 1..20: note = spacer sequence
  source 1..20: mol_type = other RNA
aatgcatcctctatcagaga

SEQ ID NO: 5630 - RNA, 20 nt, synthetic construct
  misc_feature 1..20: note = spacer sequence
  source 1..20: mol_type = other RNA
gagggtctaaatagcgtaaa

SEQ ID NO: 5631 - RNA, 20 nt, synthetic construct
  misc_feature 1..20: note = spacer sequence
  source 1..20: mol_type = other RNA
gactctaatgcatcctctat

SEQ ID NO: 5632 - RNA, 20 nt, synthetic construct
  misc_feature 1..20: note = spacer sequence
  source 1..20: mol_type = other RNA
aaatagcgtaaataataaat

SEQ ID NO: 5633 - RNA, 20 nt, synthetic construct
  misc_feature 1..20: note = spacer sequence
  source 1..20: mol_type = other RNA
atagtagtgtactccaaacg

SEQ ID NO: 5634 - RNA, 20 nt, synthetic construct
  misc_feature 1..20: note = spacer sequence
  source 1..20: mol_type = other RNA
atttatttacttatttatta

SEQ ID NO: 5635 - RNA, 20 nt, synthetic construct
  misc_feature 1..20: note = spacer sequence
  source 1..20: mol_type = other RNA
aaacgaggctggaatagctt

SEQ ID NO: 5636 - RNA, 20 nt, synthetic construct
  misc_feature 1..20: note = spacer sequence
  source 1..20: mol_type = other RNA
tttggagtacactactatcg

SEQ ID NO: 5637 - RNA, 20 nt, synthetic construct
  misc_feature 1..20: note = spacer sequence
  source 1..20: mol_type = other RNA
agcctcgtttggagtacact

SEQ ID NO: 5638 - RNA, 20 nt, synthetic construct
  misc_feature 1..20: note = spacer sequence
  source 1..20: mol_type = other RNA
attgttgtttcacactggac

SEQ ID NO: 5639 - RNA, 20 nt, synthetic construct
  misc_feature 1..20: note = spacer sequence
  source 1..20: mol_type = other RNA
cactggacttcaattaagtc

SEQ ID NO: 5640 - RNA, 20 nt, synthetic construct
  misc_feature 1..20: note = spacer sequence
  source 1..20: mol_type = other RNA
agtgtgaaacaacaatagaa

SEQ ID NO: 5641 - RNA, 20 nt, synthetic construct
  misc_feature 1..20: note = spacer sequence
  source 1..20: mol_type = other RNA
attaagtctcagtattttgc

SEQ ID NO: 5642 - RNA, 20 nt, synthetic construct
  misc_feature 1..20: note = spacer sequence
  source 1..20: mol_type = other RNA
cagtattttgccatactcaa

SEQ ID NO: 5643 - RNA, 20 nt, synthetic construct
  misc_feature 1..20: note = spacer sequence
  source 1..20: mol_type = other RNA
gtattttgccatactcaata

SEQ ID NO: 5644 - RNA, 20 nt, synthetic construct
  misc_feature 1..20: note = spacer sequence
  source 1..20: mol_type = other RNA
atattaagtactaggctgga

SEQ ID NO: 5645 - RNA, 20 nt, synthetic construct
  misc_feature 1..20: note = spacer sequence
  source 1..20: mol_type = other RNA
agcctagtacttaatattga

SEQ ID NO: 5646 - RNA, 20 nt, synthetic construct
  misc_feature 1..20: note = spacer sequence
  source 1..20: mol_type = other RNA
tgtctgtaatcccagcactt

SEQ ID NO: 5647 - RNA, 20 nt, synthetic construct
  misc_feature 1..20: note = spacer sequence
  source 1..20: mol_type = other RNA
gtaatcccagcactttggga

SEQ ID NO: 5648 - RNA, 20 nt, synthetic construct
  misc_feature 1..20: note = spacer sequence
  source 1..20: mol_type = other RNA
cagcactttgggaggccgag

SEQ ID NO: 5649 - RNA, 20 nt, synthetic construct
  misc_feature 1..20: note = spacer sequence
  source 1..20: mol_type = other RNA
caaagtgctgggattacaga

SEQ ID NO: 5650 - RNA, 20 nt, synthetic construct
  misc_feature 1..20: note = spacer sequence
  source 1..20: mol_type = other RNA
gcctcccaaagtgctgggat

SEQ ID NO: 5651 - RNA, 20 nt, synthetic construct
  misc_feature 1..20: note = spacer sequence
  source 1..20: mol_type = other RNA
acccacctcggcctcccaaa

SEQ ID NO: 5652 - RNA, 20 nt, synthetic construct
  misc_feature 1..20: note = spacer sequence
  source 1..20: mol_type = other RNA
agccagccatctacccacct

SEQ ID NO: 5653 - RNA, 20 nt, synthetic construct
  misc_feature 1..20: note = spacer sequence
  source 1..20: mol_type = other RNA
ggagtttgaaaccagcctgg

SEQ ID NO: 5654 - RNA, 20 nt, synthetic construct
  misc_feature 1..20: note = spacer sequence
  source 1..20: mol_type = other RNA
tgagctcaagccagccatct

SEQ ID NO: 5655 - RNA, 20 nt, synthetic construct
  misc_feature 1..20: note = spacer sequence
  source 1..20: mol_type = other RNA
aactcctgagctcaagccag

SEQ ID NO: 5656 - RNA, 20 nt, synthetic construct
  misc_feature 1..20: note = spacer sequence
  source 1..20: mol_type = other RNA
gtacccaaaatacaaaaatc

SEQ ID NO: 5657 - RNA, 20 nt, synthetic construct
  misc_feature 1..20: note = spacer sequence
  source 1..20: mol_type = other RNA
gccaggtgtggtggcacatg

SEQ ID NO: 5658 - RNA, 20 nt, synthetic construct
  misc_feature 1..20: note = spacer sequence
  source 1..20: mol_type = other RNA
caggtacttgggaggctgag

SEQ ID NO: 5659 - RNA, 20 nt, synthetic construct
  misc_feature 1..20: note = spacer sequence
  source 1..20: mol_type = other RNA
caagtacctgggaccacagg

SEQ ID NO: 5660 - RNA, 20 nt, synthetic construct
  misc_feature 1..20: note = spacer sequence
  source 1..20: mol_type = other RNA
gcctcccaagtacctgggac

SEQ ID NO: 5661 - RNA, 20 nt, synthetic construct
  misc_feature 1..20: note = spacer sequence
  source 1..20: mol_type = other RNA
tgcctcagcctcccaagtac

SEQ ID NO: 5662 - RNA, 20 nt, synthetic construct
  misc_feature 1..20: note = spacer sequence
  source 1..20: mol_type = other RNA
tcctgcctcagcctcccaag

SEQ ID NO: 5663 - RNA, 20 nt, synthetic construct
  misc_feature 1..20: note = spacer sequence
  source 1..20: mol_type = other RNA
agccatcctcctgcctcagc

SEQ ID NO: 5664 - RNA, 20 nt, synthetic construct
  misc_feature 1..20: note = spacer sequence
  source 1..20: mol_type = other RNA
tgggttcaagccatcctcct

SEQ ID NO: 5665 - RNA, 20 nt, synthetic construct
  misc_feature 1..20: note = spacer sequence
  source 1..20: mol_type = other RNA
acctcctgggttcaagccat

SEQ ID NO: 5666 - RNA, 20 nt, synthetic construct
  misc_feature 1..20: note = spacer sequence
  source 1..20: mol_type = other RNA
ctgcagcctccacctcctgg

SEQ ID NO: 5667 - RNA, 20 nt, synthetic construct
  misc_feature 1..20: note = spacer sequence
  source 1..20: mol_type = other RNA
tagctcactgcagcctccac

SEQ ID NO: 5668 - RNA, 20 nt, synthetic construct
  misc_feature 1..20: note = spacer sequence
  source 1..20: mol_type = other RNA
agcctgggtgacagagcgag

SEQ ID NO: 5669 - RNA, 20 nt, synthetic construct
  misc_feature 1..20: note = spacer sequence
  source 1..20: mol_type = other RNA
cccaggctggagtgcagtgg

SEQ ID NO: 5670 - RNA, 20 nt, synthetic construct
  misc_feature 1..20: note = spacer sequence
  source 1..20: mol_type = other RNA
gtcacccaggctggagtgca

SEQ ID NO: 5671 - RNA, 20 nt, synthetic construct
  misc_feature 1..20: note = spacer sequence
  source 1..20: mol_type = other RNA
ctctgtcacccaggctggag

SEQ ID NO: 5672 - RNA, 20 nt, synthetic construct
  misc_feature 1..20: note = spacer sequence
  source 1..20: mol_type = other RNA
cgctctgtcacccaggctgg

SEQ ID NO: 5673 - RNA, 20 nt, synthetic construct
  misc_feature 1..20: note = spacer sequence
  source 1..20: mol_type = other RNA
caaaaatcaaacaaacaacc

SEQ ID NO: 5674 - RNA, 20 nt, synthetic construct
  misc_feature 1..20: note = spacer sequence
  source 1..20: mol_type = other RNA
aaaatcaaacaaacaacccc

SEQ ID NO: 5675 - RNA, 20 nt, synthetic construct
  misc_feature 1..20: note = spacer sequence
  source 1..20: mol_type = other RNA
aacaaacaaccccctcgccc

SEQ ID NO: 5676 - RNA, 20 nt, synthetic construct
  misc_feature 1..20: note = spacer sequence
  source 1..20: mol_type = other RNA
ccccggacaaaagtagtttg

SEQ ID NO: 5677 - RNA, 20 nt, synthetic construct
  misc_feature 1..20: note = spacer sequence
  source 1..20: mol_type = other RNA
ggggcgagggggttgtttgt

SEQ ID NO: 5678 - RNA, 20 nt, synthetic construct
  misc_feature 1..20: note = spacer sequence
  source 1..20: mol_type = other RNA
catttcacaatatgtttttg

SEQ ID NO: 5679 - RNA, 20 nt, synthetic construct
  misc_feature 1..20: note = spacer sequence
  source 1..20: mol_type = other RNA
tttcacaatatgtttttgaa

SEQ ID NO: 5680 - RNA, 20 nt, synthetic construct
  misc_feature 1..20: note = spacer sequence
  source 1..20: mol_type = other RNA
caatatgtttttgaaatatt

SEQ ID NO: 5681 - RNA, 20 nt, synthetic construct
  misc_feature 1..20: note = spacer sequence
  source 1..20: mol_type = other RNA
aaaacatattgtgaaatgag

SEQ ID NO: 5682 - RNA, 20 nt, synthetic construct
  misc_feature 1..20: note = spacer sequence
  source 1..20: mol_type = other RNA
cttgaaaggtaagtcatatt

SEQ ID NO: 5683 - RNA, 20 nt, synthetic construct
  misc_feature 1..20: note = spacer sequence
  source 1..20: mol_type = other RNA
agggaaatatttcaaaaaca

SEQ ID NO: 5684 - RNA, 20 nt, synthetic construct
  misc_feature 1..20: note = spacer sequence
  source 1..20: mol_type = other RNA
tatttatcattcctgttgta

SEQ ID NO: 5685 - RNA, 20 nt, synthetic construct
  misc_feature 1..20: note = spacer sequence
  source 1..20: mol_type = other RNA
ttcctgttgtatggaggcat

SEQ ID NO: 5686 - RNA, 20 nt, synthetic construct
  misc_feature 1..20: note = spacer sequence
  source 1..20: mol_type = other RNA
tgttgtatggaggcatcata

SEQ ID NO: 5687 - RNA, 20 nt, synthetic construct
  misc_feature 1..20: note = spacer sequence
  source 1..20: mol_type = other RNA
atacaacaggaatgataaat

SEQ ID NO: 5688 - RNA, 20 nt, synthetic construct
  misc_feature 1..20: note = spacer sequence
  source 1..20: mol_type = other RNA
taaattatttcaccattcta

SEQ ID NO: 5689 - RNA, 20 nt, synthetic construct
  misc_feature 1..20: note = spacer sequence
  source 1..20: mol_type = other RNA
ccattctaccctccttgagt

SEQ ID NO: 5690 - RNA, 20 nt, synthetic construct
  misc_feature 1..20: note = spacer sequence
  source 1..20: mol_type = other RNA
accctccttgagtgttgtgg

SEQ ID NO: 5691 - RNA, 20 nt, synthetic construct
  misc_feature 1..20: note = spacer sequence
  source 1..20: mol_type = other RNA
ttgagtgttgtggcctttag

SEQ ID NO: 5692 - RNA, 20 nt, synthetic construct
  misc_feature 1..20: note = spacer sequence
  source 1..20: mol_type = other RNA
aggagggtagaatggtgaaa

SEQ ID NO: 5693 - RNA, 20 nt, synthetic construct
  misc_feature 1..20: note = spacer sequence
  source 1..20: mol_type = other RNA
ggcctaaaggccacaacact

SEQ ID NO: 5694 - RNA, 20 nt, synthetic construct
  misc_feature 1..20: note = spacer sequence
  source 1..20: mol_type = other RNA
cctgcgtttttgtctggcct

SEQ ID NO: 5695 - RNA, 20 nt, synthetic construct
  misc_feature 1..20: note = spacer sequence
  source 1..20: mol_type = other RNA
aggcatcacctgcgtttttg

SEQ ID NO: 5696 - RNA, 20 nt, synthetic construct
  misc_feature 1..20: note = spacer sequence
  source 1..20: mol_type = other RNA
gtagggttgtggccttgcca

SEQ ID NO: 5697 - RNA, 20 nt, synthetic construct
  misc_feature 1..20: note = spacer sequence
  source 1..20: mol_type = other RNA
tgtttggcaaggccacaacc

SEQ ID NO: 5698 - RNA, 20 nt, synthetic construct
  misc_feature 1..20: note = spacer sequence
  source 1..20: mol_type = other RNA
ttttatatttttcctgtttg

SEQ ID NO: 5699 - RNA, 20 nt, synthetic construct
  misc_feature 1..20: note = spacer sequence
  source 1..20: mol_type = other RNA
gtattctttttatatttttc

SEQ ID NO: 5700 - RNA, 20 nt, synthetic construct
  misc_feature 1..20: note = spacer sequence
  source 1..20: mol_type = other RNA
gccaaccaaataagaaactc

SEQ ID NO: 5701 - RNA, 20 nt, synthetic construct
  misc_feature 1..20: note = spacer sequence
  source 1..20: mol_type = other RNA
tatttggttggcagaattcg

SEQ ID NO: 5702 - RNA, 20 nt, synthetic construct
  misc_feature 1..20: note = spacer sequence
  source 1..20: mol_type = other RNA
atactaaggactaagaaaat

SEQ ID NO: 5703 - RNA, 20 nt, synthetic construct
  misc_feature 1..20: note = spacer sequence
  source 1..20: mol_type = other RNA
ttagtatagagtttcttatt

SEQ ID NO: 5704 - RNA, 20 nt, synthetic construct
  misc_feature 1..20: note = spacer sequence
  source 1..20: mol_type = other RNA
tagtccttagtatagagttt

SEQ ID NO: 5705 - RNA, 20 nt, synthetic construct
  misc_feature 1..20: note = spacer sequence
  source 1..20: mol_type = other RNA
cctgcaattttcttagtcct

SEQ ID NO: 5706 - RNA, 20 nt, synthetic construct
  misc_feature 1..20: note = spacer sequence
  source 1..20: mol_type = other RNA
tcccctgcaattttcttagt

SEQ ID NO: 5707 - RNA, 20 nt, synthetic construct
  misc_feature 1..20: note = spacer sequence
  source 1..20: mol_type = other RNA
cgggattgaggtgtagcgac

SEQ ID NO: 5708 - RNA, 20 nt, synthetic construct
  misc_feature 1..20: note = spacer sequence
  source 1..20: mol_type = other RNA
cgggacttaccttttcttcc

SEQ ID NO: 5709 - RNA, 20 nt, synthetic construct
  misc_feature 1..20: note = spacer sequence
  source 1..20: mol_type = other RNA
atcccgggacttaccttttc

SEQ ID NO: 5710 - RNA, 20 nt, synthetic construct
  misc_feature 1..20: note = spacer sequence
  source 1..20: mol_type = other RNA
ctacacctcaatcccgggac

SEQ ID NO: 5711 - RNA, 20 nt, synthetic construct
  misc_feature 1..20: note = spacer sequence
  source 1..20: mol_type = other RNA
ataccctcagaaaactaaaa

SEQ ID NO: 5712 - RNA, 20 nt, synthetic construct
  misc_feature 1..20: note = spacer sequence
  source 1..20: mol_type = other RNA
gaaaactaaaaaacaagaca

SEQ ID NO: 5713 - RNA, 20 nt, synthetic construct
  misc_feature 1..20: note = spacer sequence
  source 1..20: mol_type = other RNA
gagggtatagaaagtcgcta

SEQ ID NO: 5714 - RNA, 20 nt, synthetic construct
  misc_feature 1..20: note = spacer sequence
  source 1..20: mol_type = other RNA
tgttttttagttttctgagg

SEQ ID NO: 5715 - RNA, 20 nt, synthetic construct
  misc_feature 1..20: note = spacer sequence
  source 1..20: mol_type = other RNA
tttttttgtcttgtttttta

SEQ ID NO: 5716 - RNA, 20 nt, synthetic construct
  misc_feature 1..20: note = spacer sequence
  source 1..20: mol_type = other RNA
atcttggggcgtcccaattg

SEQ ID NO: 5717 - RNA, 20 nt, synthetic construct
  misc_feature 1..20: note = spacer sequence
  source 1..20: mol_type = other RNA
tggggcgtcccaattgctga

SEQ ID NO: 5718 - RNA, 20 nt, synthetic construct
  misc_feature 1..20: note = spacer sequence
  source 1..20: mol_type = other RNA
caattgctgagtaacaaatg

SEQ ID NO: 5719 - RNA, 20 nt, synthetic construct
  misc_feature 1..20: note = spacer sequence
  source 1..20: mol_type = other RNA
gcaattgggacgccccaaga

SEQ ID NO: 5720 - RNA, 20 nt, synthetic construct
  misc_feature 1..20: note = spacer sequence
  source 1..20: mol_type = other RNA
tttgttactcagcaattggg

SEQ ID NO: 5721 - RNA, 20 nt, synthetic construct
  misc_feature 1..20: note = spacer sequence
  source 1..20: mol_type = other RNA
catttgttactcagcaattg

SEQ ID NO: 5722 - RNA, 20 nt, synthetic construct
  misc_feature 1..20: note = spacer sequence
  source 1..20: mol_type = other RNA
gtcataactaatgacatttc

SEQ ID NO: 5723 - RNA, 20 nt, synthetic construct
  misc_feature 1..20: note = spacer sequence
  source 1..20: mol_type = other RNA
taactaatgacatttctaga

SEQ ID NO: 5724 - RNA, 20 nt, synthetic construct
  misc_feature 1..20: note = spacer sequence
  source 1..20: mol_type = other RNA
ttagttatgactgagtttgg

SEQ ID NO: 5725 - RNA, 20 nt, synthetic construct
  misc_feature 1..20: note = spacer sequence
  source 1..20: mol_type = other RNA
agacaaagtgacttcagatt

SEQ ID NO: 5726 - RNA, 20 nt, synthetic construct
  misc_feature 1..20: note = spacer sequence
  source 1..20: mol_type = other RNA
agaaatgtcattagttatga

SEQ ID NO: 5727 - RNA, 20 nt, synthetic construct
  misc_feature 1..20: note = spacer sequence
  source 1..20: mol_type = other RNA
ctttgtctagaaatgtcatt

SEQ ID NO: 5728 - RNA, 20 nt, synthetic construct
  misc_feature 1..20: note = spacer sequence
  source 1..20: mol_type = other RNA
gattttcaaagcgtaccctg

SEQ ID NO: 5729 - RNA, 20 nt, synthetic construct
  misc_feature 1..20: note = spacer sequence
  source 1..20: mol_type = other RNA
gaagtcactttgtctagaaa

SEQ ID NO: 5730 - RNA, 20 nt, synthetic construct
  misc_feature 1..20: note = spacer sequence
  source 1..20: mol_type = other RNA
aagcgtaccctgtttacatc

SEQ ID NO: 5731 - RNA, 20 nt, synthetic construct
  misc_feature 1..20: note = spacer sequence
  source 1..20: mol_type = other RNA
ttttgccaatttcgcgtact

SEQ ID NO: 5732 - RNA, 20 nt, synthetic construct
  misc_feature 1..20: note = spacer sequence
  source 1..20: mol_type = other RNA
cgtactgcaaccggcgggcc

SEQ ID NO: 5733 - RNA, 20 nt, synthetic construct
  misc_feature 1..20: note = spacer sequence
  source 1..20: mol_type = other RNA
cgggggcgtggcccgccggt

SEQ ID NO: 5734 - RNA, 20 nt, synthetic construct
  misc_feature 1..20: note = spacer sequence
  source 1..20: mol_type = other RNA
tttcacgggggcgtggcccg

SEQ ID NO: 5735 - RNA, 20 nt, synthetic construct
  misc_feature 1..20: note = spacer sequence
  source 1..20: mol_type = other RNA
ccacatttcggggttctgga

SEQ ID NO: 5736 - RNA, 20 nt, synthetic construct
  misc_feature 1..20: note = spacer sequence
  source 1..20: mol_type = other RNA
acatttcggggttctggacg

SEQ ID NO: 5737 - RNA, 20 nt, synthetic construct
  misc_feature 1..20: note = spacer sequence
  source 1..20: mol_type = other RNA
gggttctggacgtttcccgg

SEQ ID NO: 5738 - RNA, 20 nt, synthetic construct
  misc_feature 1..20: note = spacer sequence
  source 1..20: mol_type = other RNA
ggacgtttcccggctgcggg

SEQ ID NO: 5739 - RNA, 20 nt, synthetic construct
  misc_feature 1..20: note = spacer sequence
  source 1..20: mol_type = other RNA
agaaccccgaaatgtggaga

SEQ ID NO: 5740 - RNA, 20 nt, synthetic construct
  misc_feature 1..20: note = spacer sequence
  source 1..20: mol_type = other RNA
cggctgcggggcggggggag

SEQ ID NO: 5741 - RNA, 20 nt, synthetic construct
  misc_feature 1..20: note = spacer sequence
  source 1..20: mol_type = other RNA
ccccgccccgcagccgggaa

SEQ ID NO: 5742 - RNA, 20 nt, synthetic construct
  misc_feature 1..20: note = spacer sequence
  source 1..20: mol_type = other RNA
ccggcgcacgcggccccttg

SEQ ID NO: 5743 - RNA, 20 nt, synthetic construct
  misc_feature 1..20: note = spacer sequence
  source 1..20: mol_type = other RNA
ggcgcacgcggccccttggc

SEQ ID NO: 5744 - RNA, 20 nt, synthetic construct
  misc_feature 1..20: note = spacer sequence
  source 1..20: mol_type = other RNA
ttcccggccactcgcgaccc

SEQ ID NO: 5745 - RNA, 20 nt, synthetic construct
  misc_feature 1..20: note = spacer sequence
  source 1..20: mol_type = other RNA
cggccactcgcgacccgagg

SEQ ID NO: 5746 - RNA, 20 nt, synthetic construct
  misc_feature 1..20: note = spacer sequence
  source 1..20: mol_type = other RNA
cgacccgaggctgccgcagg

SEQ ID NO: 5747 - RNA, 20 nt, synthetic construct
  misc_feature 1..20: note = spacer sequence
  source 1..20: mol_type = other RNA
cgagtggccgggaatgactg

SEQ ID NO: 5748 - RNA, 20 nt, synthetic construct
  misc_feature 1..20: note = spacer sequence
  source 1..20: mol_type = other RNA
ggtcgcgagtggccgggaat

SEQ ID NO: 5749 - RNA, 20 nt, synthetic construct
  misc_feature 1..20: note = spacer sequence
  source 1..20: mol_type = other RNA
gcccgccccctgcggcagcc

SEQ ID NO: 5750 - RNA, 20 nt, synthetic construct
  misc_feature 1..20: note = spacer sequence
  source 1..20: mol_type = other RNA
cacgcgctcagcccgccccc

SEQ ID NO: 5751 - RNA, 20 nt, synthetic construct
  misc_feature 1..20: note = spacer sequence
  source 1..20: mol_type = other RNA
cctcgcacgcgctcagcccg

SEQ ID NO: 5752 - RNA, 20 nt, synthetic construct
  misc_feature 1..20: note = spacer sequence
  source 1..20: mol_type = other RNA
ggccccaaaccaatcgcctc

SEQ ID NO: 5753 - RNA, 20 nt, synthetic construct
  misc_feature 1..20: note = spacer sequence
  source 1..20: mol_type = other RNA
cccactctggccccaaacca

SEQ ID NO: 5754 - RNA, 20 nt, synthetic construct
  misc_feature 1..20: note = spacer sequence
  source 1..20: mol_type = other RNA
gcgcctcgcccactctggcc

SEQ ID NO: 5755 - RNA, 20 nt, synthetic construct
  misc_feature 1..20: note = spacer sequence
  source 1..20: mol_type = other RNA
ggcctataaagtagtcgcgg

SEQ ID NO: 5756 - RNA, 20 nt, synthetic construct
  misc_feature 1..20: note = spacer sequence
  source 1..20: mol_type = other RNA
cggagacggggtgctggttt

SEQ ID NO: 5757 - RNA, 20 nt, synthetic construct
  misc_feature 1..20: note = spacer sequence
  source 1..20: mol_type = other RNA
gcgactactttataggccag

SEQ ID NO: 5758 - RNA, 20 nt, synthetic construct
  misc_feature 1..20: note = spacer sequence
  source 1..20: mol_type = other RNA
ccgcgactactttataggcc

SEQ ID NO: 5759 - RNA, 20 nt, synthetic construct
  misc_feature 1..20: note = spacer sequence
  source 1..20: mol_type = other RNA
tagtctcctgcagcgtctgg

SEQ ID NO: 5760 - RNA, 20 nt, synthetic construct
  misc_feature 1..20: note = spacer sequence
  source 1..20: mol_type = other RNA
cctgcagcgtctggggtttc

SEQ ID NO: 5761 - RNA, 20 nt, synthetic construct
  misc_feature 1..20: note = spacer sequence
  source 1..20: mol_type = other RNA
tgcagcgtctggggtttccg

SEQ ID NO: 5762 - RNA, 20 nt, synthetic construct
  misc_feature 1..20: note = spacer sequence
  source 1..20: mol_type = other RNA
ggggtttccgttgcagtcct

SEQ ID NO: 5763 - RNA, 20 nt, synthetic construct
  misc_feature 1..20: note = spacer sequence
  source 1..20: mol_type = other RNA
gttgcagtcctcggaaccag

SEQ ID NO: 5764 - RNA, 20 nt, synthetic construct
  misc_feature 1..20: note = spacer sequence
  source 1..20: mol_type = other RNA
tcggaaccaggacctcggcg

SEQ ID NO: 5765 - RNA, 20 nt, synthetic construct
  misc_feature 1..20: note = spacer sequence
  source 1..20: mol_type = other RNA
gaaccaggacctcggcgtgg

SEQ ID NO: 5766 - RNA, 20 nt, synthetic construct
  misc_feature 1..20: note = spacer sequence
  source 1..20: mol_type = other RNA
gaggactgcaacggaaaccc

SEQ ID NO: 5767 - RNA, 20 nt, synthetic construct
  misc_feature 1..20: note = spacer sequence
  source 1..20: mol_type = other RNA
tggttccgaggactgcaacg

SEQ ID NO: 5768 - RNA, 20 nt, synthetic construct
  misc_feature 1..20: note = spacer sequence
  source 1..20: mol_type = other RNA
gcgtggcctagcgagttatg

SEQ ID NO: 5769 - RNA, 20 nt, synthetic construct
  misc_feature 1..20: note = spacer sequence
  source 1..20: mol_type = other RNA
ctaggccacgccgaggtcct

SEQ ID NO: 5770 - RNA, 20 nt, synthetic construct
  misc_feature 1..20: note = spacer sequence
  source 1..20: mol_type = other RNA
ccataactcgctaggccacg

SEQ ID NO: 5771 - RNA, 20 nt, synthetic construct
  misc_feature 1..20: note = spacer sequence
  source 1..20: mol_type = other RNA
tcgccataactcgctaggcc

SEQ ID NO: 5772 - RNA, 20 nt, synthetic construct
  misc_feature 1..20: note = spacer sequence
  source 1..20: mol_type = other RNA
gcacgcacacggccttcgtc

SEQ ID NO: 5773 - RNA, 20 nt, synthetic construct
  misc_feature 1..20: note = spacer sequence
  source 1..20: mol_type = other RNA
cccttcagcacgcacacggc

SEQ ID NO: 5774 - RNA, 20 nt, synthetic construct
  misc_feature 1..20: note = spacer sequence
  source 1..20: mol_type = other RNA
tcaatttcgagcagaaggca

SEQ ID NO: 5775 - RNA, 20 nt, synthetic construct
  misc_feature 1..20: note = spacer sequence
  source 1..20: mol_type = other RNA
atttcgagcagaaggcaagg

SEQ ID NO: 5776 - RNA, 20 nt, synthetic construct
  misc_feature 1..20: note = spacer sequence
  source 1..20: mol_type = other RNA
agcagaaggcaagggctggg

SEQ ID NO: 5777 - RNA, 20 nt, synthetic construct
  misc_feature 1..20: note = spacer sequence
  source 1..20: mol_type = other RNA
aaattgatgatgccctgcac

SEQ ID NO: 5778 - RNA, 20 nt, synthetic construct
  misc_feature 1..20: note = spacer sequence
  source 1..20: mol_type = other RNA
gctcgaaattgatgatgccc

SEQ ID NO: 5779 - RNA, 20 nt, synthetic construct
  misc_feature 1..20: note = spacer sequence
  source 1..20: mol_type = other RNA
cagcccttgccttctgctcg

SEQ ID NO: 5780 - RNA, 20 nt, synthetic construct
  misc_feature 1..20: note = spacer sequence
  source 1..20: mol_type = other RNA
gtcccagcccttgccttctg

SEQ ID NO: 5781 - RNA, 20 nt, synthetic construct
  misc_feature 1..20: note = spacer sequence
  source 1..20: mol_type = other RNA
caaacaagcctccgtcccag

SEQ ID NO: 5782 - RNA, 20 nt, synthetic construct
  misc_feature 1..20: note = spacer sequence
  source 1..20: mol_type = other RNA
cacccgctcgtccccccgcg

SEQ ID NO: 5783 - RNA, 20 nt, synthetic construct
  misc_feature 1..20: note = spacer sequence
  source 1..20: mol_type = other RNA
tccccccgcgcacctttgct

SEQ ID NO: 5784 - RNA, 20 nt, synthetic construct
  misc_feature 1..20: note = spacer sequence
  source 1..20: mol_type = other RNA
ccccgcgcacctttgctagg

SEQ ID NO: 5785 - RNA, 20 nt, synthetic construct
  misc_feature 1..20: note = spacer sequence
  source 1..20: mol_type = other RNA
tagcaaaggtgcgcgggggg

SEQ ID NO: 5786 - RNA, 20 nt, synthetic construct
  misc_feature 1..20: note = spacer sequence
  source 1..20: mol_type = other RNA
cccgccaggcctcggggccg

SEQ ID NO: 5787 - RNA, 20 nt, synthetic construct
  misc_feature 1..20: note = spacer sequence
  source 1..20: mol_type = other RNA
gggccgccctggtccagcgc

SEQ ID NO: 5788 - RNA, 20 nt, synthetic construct
  misc_feature 1..20: note = spacer sequence
  source 1..20: mol_type = other RNA
agcgcccggtcccggcccgt

SEQ ID NO: 5789 - RNA, 20 nt, synthetic construct
  misc_feature 1..20: note = spacer sequence
  source 1..20: mol_type = other RNA
cggcccgtgccgcccggtcg

SEQ ID NO: 5790 - RNA, 20 nt, synthetic construct
  misc_feature 1..20: note = spacer sequence
  source 1..20: mol_type = other RNA
gtgccttcgcccccagcggt

SEQ ID NO: 5791 - RNA, 20 nt, synthetic construct
  misc_feature 1..20: note = spacer sequence
  source 1..20: mol_type = other RNA
cccccagcggtgcggtgccc

SEQ ID NO: 5792 - RNA, 20 nt, synthetic construct
  misc_feature 1..20: note = spacer sequence
  source 1..20: mol_type = other RNA
gcacttgggcaccgcaccgc

SEQ ID NO: 5793 - RNA, 20 nt, synthetic construct
  misc_feature 1..20: note = spacer sequence
  source 1..20: mol_type = other RNA
ccgggcgggcccgggcgcgg

SEQ ID NO: 5794 - RNA, 20 nt, synthetic construct
  misc_feature 1..20: note = spacer sequence
  source 1..20: mol_type = other RNA
cacgccccgcgcccgggccc

SEQ ID NO: 5795 - RNA, 20 nt, synthetic construct
  misc_feature 1..20: note = spacer sequence
  source 1..20: mol_type = other RNA
gtcccacgccccgcgcccgg

SEQ ID NO: 5796 - RNA, 20 nt, synthetic construct
  misc_feature 1..20: note = spacer sequence
  source 1..20: mol_type = other RNA
cgccacgcgcaggcccagcc

SEQ ID NO: 5797 - RNA, 20 nt, synthetic construct
  misc_feature 1..20: note = spacer sequence
  source 1..20: mol_type = other RNA
ccgcgctcccgccacgcgca

SEQ ID NO: 5798 - RNA, 20 nt, synthetic construct
  misc_feature 1..20: note = spacer sequence
  source 1..20: mol_type = other RNA
ctccccgcgctcccgccacg

SEQ ID NO: 5799 - RNA, 20 nt, synthetic construct
  misc_feature 1..20: note = spacer sequence
  source 1..20: mol_type = other RNA
ccggcccgcggcaatccctc

SEQ ID NO: 5800 - RNA, 20 nt, synthetic construct
  misc_feature 1..20: note = spacer sequence
  source 1..20: mol_type = other RNA
gtggtccttgggccgccgcc

SEQ ID NO: 5801 - RNA, 20 nt, synthetic construct
  misc_feature 1..20: note = spacer sequence
  source 1..20: mol_type = other RNA
ttgggccgccgccgcgggtc

SEQ ID NO: 5802 - RNA, 20 nt, synthetic construct
  misc_feature 1..20: note = spacer sequence
  source 1..20: mol_type = other RNA
gtcgtggtgcctggagcggc

SEQ ID NO: 5803 - RNA, 20 nt, synthetic construct
  misc_feature 1..20: note = spacer sequence
  source 1..20: mol_type = other RNA
tggtgcctggagcggctgtg

SEQ ID NO: 5804 - RNA, 20 nt, synthetic construct
  misc_feature 1..20: note = spacer sequence
  source 1..20: mol_type = other RNA
aggcaccacgacagacccgc

SEQ ID NO: 5805 - RNA, 20 nt, synthetic construct
  misc_feature 1..20: note = spacer sequence
  source 1..20: mol_type = other RNA
tcccttgcttggccgtgttc

SEQ ID NO: 5806 - RNA, 20 nt, synthetic construct
  misc_feature 1..20: note = spacer sequence
  source 1..20: mol_type = other RNA
cttgcttggccgtgttctcg

SEQ ID NO: 5807 - RNA, 20 nt, synthetic construct
  misc_feature 1..20: note = spacer sequence
  source 1..20: mol_type = other RNA
cgttcctgagggtcccgcgg

SEQ ID NO: 5808 - RNA, 20 nt, synthetic construct
  misc_feature 1..20: note = spacer sequence
  source 1..20: mol_type = other RNA
ttcctgagggtcccgcggac

SEQ ID NO: 5809 - RNA, 20 nt, synthetic construct
  misc_feature 1..20: note = spacer sequence
  source 1..20: mol_type = other RNA
tgagggtcccgcggacaccg

SEQ ID NO: 5810 - RNA, 20 nt, synthetic construct
  misc_feature 1..20: note = spacer sequence
  source 1..20: mol_type = other RNA
ggaacgagaacacggccaag

SEQ ID NO: 5811 - RNA, 20 nt, synthetic construct
  misc_feature 1..20: note = spacer sequence
  source 1..20: mol_type = other RNA
cgcggacaccgagtggcgca

SEQ ID NO: 5812 - RNA, 20 nt, synthetic construct
  misc_feature 1..20: note = spacer sequence
  source 1..20: mol_type = other RNA
gcgggaccctcaggaacgag

SEQ ID NO: 5813 - RNA, 20 nt, synthetic construct
  misc_feature 1..20: note = spacer sequence
  source 1..20: mol_type = other RNA
gtgtccgcgggaccctcagg

SEQ ID NO: 5814 - RNA, 20 nt, synthetic construct
  misc_feature 1..20: note = spacer sequence
  source 1..20: mol_type = other RNA
ccgggctgggcctggcactg

SEQ ID NO: 5815 - RNA, 20 nt, synthetic construct
  misc_feature 1..20: note = spacer sequence
  source 1..20: mol_type = other RNA
ccatccccgggctgggcctg

SEQ ID NO: 5816 - RNA, 20 nt, synthetic construct
  misc_feature 1..20: note = spacer sequence
  source 1..20: mol_type = other RNA
tcgcatccctctccgctttc

SEQ ID NO: 5817 - RNA, 20 nt, synthetic construct
  misc_feature 1..20: note = spacer sequence
  source 1..20: mol_type = other RNA
catccctctccgctttccgg

SEQ ID NO: 5818 - RNA, 20 nt, synthetic construct
  misc_feature 1..20: note = spacer sequence
  source 1..20: mol_type = other RNA
ctctccgctttccggcttca

SEQ ID NO: 5819 - RNA, 20 nt, synthetic construct
  misc_feature 1..20: note = spacer sequence
  source 1..20: mol_type = other RNA
ccgctttccggcttcagcgc

SEQ ID NO: 5820 - RNA, 20 nt, synthetic construct
  misc_feature 1..20: note = spacer sequence
  source 1..20: mol_type = other RNA
gctttccggcttcagcgctc

SEQ ID NO: 5821 - RNA, 20 nt, synthetic construct
  misc_feature 1..20: note = spacer sequence
  source 1..20: mol_type = other RNA
ggcttcagcgctctaggtca

SEQ ID NO: 5822 - RNA, 20 nt, synthetic construct
  misc_feature 1..20: note = spacer sequence
  source 1..20: mol_type = other RNA
gcgctctaggtcagggagtc

SEQ ID NO: 5823 - RNA, 20 nt, synthetic construct
  misc_feature 1..20: note = spacer sequence
  source 1..20: mol_type = other RNA
aggtcagggagtcttcgctt

SEQ ID NO: 5824 - RNA, 20 nt, synthetic construct
  misc_feature 1..20: note = spacer sequence
  source 1..20: mol_type = other RNA
gggagtcttcgcttttgtac

SEQ ID NO: 5825 - RNA, 20 nt, synthetic construct
  misc_feature 1..20: note = spacer sequence
  source 1..20: mol_type = other RNA
ctgacctagagcgctgaagc

SEQ ID NO: 5826 - RNA, 20 nt, synthetic construct
  misc_feature 1..20: note = spacer sequence
  source 1..20: mol_type = other RNA
tcgcttttgtacagctctaa

SEQ ID NO: 5827 - RNA, 20 nt, synthetic construct
  misc_feature 1..20: note = spacer sequence
  source 1..20: mol_type = other RNA
cttttgtacagctctaaggc

SEQ ID NO: 5828 - RNA, 20 nt, synthetic construct
  misc_feature 1..20: note = spacer sequence
  source 1..20: mol_type = other RNA
aaggctaggaatggttttta

SEQ ID NO: 5829 - RNA, 20 nt, synthetic construct
  misc_feature 1..20: note = spacer sequence
  source 1..20: mol_type = other RNA
tagccttagagctgtacaaa

SEQ ID NO: 5830 - RNA, 20 nt, synthetic construct
  misc_feature 1..20: note = spacer sequence
  source 1..20: mol_type = other RNA
aaagccttttaaaaatataa

SEQ ID NO: 5831 - RNA, 20 nt, synthetic construct
  misc_feature 1..20: note = spacer sequence
  source 1..20: mol_type = other RNA
gttgcgtatttttgttttcc

SEQ ID NO: 5832 - RNA, 20 nt, synthetic construct
  misc_feature 1..20: note = spacer sequence
  source 1..20: mol_type = other RNA
ctgttgcgtatttttgtttt

SEQ ID NO: 5833 - RNA, 20 nt, synthetic construct
  misc_feature 1..20: note = spacer sequence
  source 1..20: mol_type = other RNA
cacaaacggtctctgttgcg

SEQ ID NO: 5834 - RNA, 20 nt, synthetic construct
  misc_feature 1..20: note = spacer sequence
  source 1..20: mol_type = other RNA
ctgcaaagtgtcacacaaac

SEQ ID NO: 5835 - RNA, 20 nt, synthetic construct
  misc_feature 1..20: note = spacer sequence
  source 1..20: mol_type = other RNA
gttctaggtcatgattgggc

SEQ ID NO: 5836 - RNA, 20 nt, synthetic construct
  misc_feature 1..20: note = spacer sequence
  source 1..20: mol_type = other RNA
aggtcatgattgggctgcaa

SEQ ID NO: 5837 - RNA, 20 nt, synthetic construct
  misc_feature 1..20: note = spacer sequence
  source 1..20: mol_type = other RNA
tgattgggctgcaagggcag

SEQ ID NO: 5838 - RNA, 20 nt, synthetic construct
  misc_feature 1..20: note = spacer sequence
  source 1..20: mol_type = other RNA
tgacctagaacagaggccag

SEQ ID NO: 5839 - RNA, 20 nt, synthetic construct
  misc_feature 1..20: note = spacer sequence
  source 1..20: mol_type = other RNA
gcccttgcagcccaatcatg

SEQ ID NO: 5840 - RNA, 20 nt, synthetic construct
  misc_feature 1..20: note = spacer sequence
  source 1..20: mol_type = other RNA
ctgcccttgcagcccaatca

SEQ ID NO: 5841 - RNA, 20 nt, synthetic construct
  misc_feature 1..20: note = spacer sequence
  source 1..20: mol_type = other RNA
aggctaccttctctgccctt

SEQ ID NO: 5842 - RNA, 20 nt, synthetic construct
  misc_feature 1..20: note = spacer sequence
  source 1..20: mol_type = other RNA
gttcaaggctaccttctctg

SEQ ID NO: 5843 - RNA, 20 nt, synthetic construct
  misc_feature 1..20: note = spacer sequence
  source 1..20: mol_type = other RNA
ttttcctcctcctaagctcc

SEQ ID NO: 5844 - RNA, 20 nt, synthetic construct
  misc_feature 1..20: note = spacer sequence
  source 1..20: mol_type = other RNA
tcctcctaagctccgggagc

SEQ ID NO: 5845 - RNA, 20 nt, synthetic construct
  misc_feature 1..20: note = spacer sequence
  source 1..20: mol_type = other RNA
tcctaagctccgggagccag

SEQ ID NO: 5846 - RNA, 20 nt, synthetic construct
  misc_feature 1..20: note = spacer sequence
  source 1..20: mol_type = other RNA
taagctccgggagccagagg

SEQ ID NO: 5847 - RNA, 20 nt, synthetic construct
  misc_feature 1..20: note = spacer sequence
  source 1..20: mol_type = other RNA
gggagccagaggtttaactg

SEQ ID NO: 5848 - RNA, 20 nt, synthetic construct
  misc_feature 1..20: note = spacer sequence
  source 1..20: mol_type = other RNA
cggagcttaggaggaggaaa

SEQ ID NO: 5849 - RNA, 20 nt, synthetic construct
  misc_feature 1..20: note = spacer sequence
  source 1..20: mol_type = other RNA
ggctcccggagcttaggagg

SEQ ID NO: 5850 - RNA, 20 nt, synthetic construct
  misc_feature 1..20: note = spacer sequence
  source 1..20: mol_type = other RNA
gttaaacctctggctcccgg

SEQ ID NO: 5851 - RNA, 20 nt, synthetic construct
  misc_feature 1..20: note = spacer sequence
  source 1..20: mol_type = other RNA
ccaaaagggtcagttaaacc

SEQ ID NO: 5852 - RNA, 20 nt, synthetic construct
  misc_feature 1..20: note = spacer sequence
  source 1..20: mol_type = other RNA
aaaatccccaaaagggtcag

SEQ ID NO: 5853 - RNA, 20 nt, synthetic construct
  misc_feature 1..20: note = spacer sequence
  source 1..20: mol_type = other RNA
ctgccctcaaaaatccccaa

SEQ ID NO: 5854 - RNA, 20 nt, synthetic construct
  misc_feature 1..20: note = spacer sequence
  source 1..20: mol_type = other RNA
taactttgggtgcacagtta

SEQ ID NO: 5855 - RNA, 20 nt, synthetic construct
  misc_feature 1..20: note = spacer sequence
  source 1..20: mol_type = other RNA
aataagctaactgtgcaccc

SEQ ID NO: 5856 - RNA, 20 nt, synthetic construct
  misc_feature 1..20: note = spacer sequence
  source 1..20: mol_type = other RNA
tcaaataagctaactgtgca

SEQ ID NO: 5857 - RNA, 20 nt, synthetic construct
  misc_feature 1..20: note = spacer sequence
  source 1..20: mol_type = other RNA
tactaaaaatacaccagagc

SEQ ID NO: 5858 - RNA, 20 nt, synthetic construct
  misc_feature 1..20: note = spacer sequence
  source 1..20: mol_type = other RNA
ggtgtatttttagtaagatc

SEQ ID NO: 5859 - RNA, 20 nt, synthetic construct
  misc_feature 1..20: note = spacer sequence
  source 1..20: mol_type = other RNA
gaccaattacatcaaaacct

SEQ ID NO: 5860 - RNA, 20 nt, synthetic construct
  misc_feature 1..20: note = spacer sequence
  source 1..20: mol_type = other RNA
gaggttgggctctggtgtat

SEQ ID NO: 5861 - RNA, 20 nt, synthetic construct
  misc_feature 1..20: note = spacer sequence
  source 1..20: mol_type = other RNA
aaacctgtcctagtgcaggg

SEQ ID NO: 5862 - RNA, 20 nt, synthetic construct
  misc_feature 1..20: note = spacer sequence
  source 1..20: mol_type = other RNA
tagtgcagggtgagtattgc

SEQ ID NO: 5863 - RNA, 20 nt, synthetic construct
  misc_feature 1..20: note = spacer sequence
  source 1..20: mol_type = other RNA
ccctgcactaggacaggttt

SEQ ID NO: 5864 - RNA, 20 nt, synthetic construct
  misc_feature 1..20: note = spacer sequence
  source 1..20: mol_type = other RNA
aaaaacagcaatactcaccc

SEQ ID NO: 5865 - RNA, 20 nt, synthetic construct
  misc_feature 1..20: note = spacer sequence
  source 1..20: mol_type = other RNA
aaaagtgattttgatgtgca

SEQ ID NO: 5866 - RNA, 20 nt, synthetic construct
  misc_feature 1..20: note = spacer sequence
  source 1..20: mol_type = other RNA
cttttggaaactttcaaaaa

SEQ ID NO: 5867 - RNA, 20 nt, synthetic construct
  misc_feature 1..20: note = spacer sequence
  source 1..20: mol_type = other RNA
aaatcacttttggaaacttt

SEQ ID NO: 5868 - RNA, 20 nt, synthetic construct
  misc_feature 1..20: note = spacer sequence
  source 1..20: mol_type = other RNA
taggtgcacatcaaaatcac

SEQ ID NO: 5869 - RNA, 20 nt, synthetic construct
  misc_feature 1..20: note = spacer sequence
  source 1..20: mol_type = other RNA
atcgtaggtgcacatcaaaa

SEQ ID NO: 5870 - RNA, 20 nt, synthetic construct
  misc_feature 1..20: note = spacer sequence
  source 1..20: mol_type = other RNA
caatcgtaggtgcacatcaa

SEQ ID NO: 5871 - RNA, 20 nt, synthetic construct
  misc_feature 1..20: note = spacer sequence
  source 1..20: mol_type = other RNA
tttgaggacagtgggtggag

SEQ ID NO: 5872 - RNA, 20 nt, synthetic construct
  misc_feature 1..20: note = spacer sequence
  source 1..20: mol_type = other RNA
aacgacagttctcaatcgta

SEQ ID NO: 5873 - RNA, 20 nt, synthetic construct
  misc_feature 1..20: note = spacer sequence
  source 1..20: mol_type = other RNA
tcaaacgacagttctcaatc

SEQ ID NO: 5874 - RNA, 20 nt, synthetic construct
  misc_feature 1..20: note = spacer sequence
  source 1..20: mol_type = other RNA
acccactgtcctcaaacgac

SEQ ID NO: 5875 - RNA, 20 nt, synthetic construct
  misc_feature 1..20: note = spacer sequence
  source 1..20: mol_type = other RNA
tatttggaaattagaagacc

SEQ ID NO: 5876 - RNA, 20 nt, synthetic construct
  misc_feature 1..20: note = spacer sequence
  source 1..20: mol_type = other RNA
aaatacgaaactccacccac

SEQ ID NO: 5877 - RNA, 20 nt, synthetic construct
  misc_feature 1..20: note = spacer sequence
  source 1..20: mol_type = other RNA
aatttccaaatacgaaactc

SEQ ID NO: 5878 - RNA, 20 nt, synthetic construct
  misc_feature 1..20: note = spacer sequence
  source 1..20: mol_type = other RNA
tctaatttccaaatacgaaa

SEQ ID NO: 5879 - RNA, 20 nt, synthetic construct
  misc_feature 1..20: note = spacer sequence
  source 1..20: mol_type = other RNA
aggtcttctaatttccaaat

SEQ ID NO: 5880 - RNA, 20 nt, synthetic construct
  misc_feature 1..20: note = spacer sequence
  source 1..20: mol_type = other RNA
attacaccgaattggcactt

SEQ ID NO: 5881 - RNA, 20 nt, synthetic construct
  misc_feature 1..20: note = spacer sequence
  source 1..20: mol_type = other RNA
gtgtaatggaaactccaggt

SEQ ID NO: 5882 - RNA, 20 nt, synthetic construct
  misc_feature 1..20: note = spacer sequence
  source 1..20: mol_type = other RNA
gagcatttcttaagccacat

SEQ ID NO: 5883 - RNA, 20 nt, synthetic construct
  misc_feature 1..20: note = spacer sequence
  source 1..20: mol_type = other RNA
gacaacagttattaagtgcc

SEQ ID NO: 5884 - RNA, 20 nt, synthetic construct
  misc_feature 1..20: note = spacer sequence
  source 1..20: mol_type = other RNA
taagccacattttcgtaaag

SEQ ID NO: 5885 - RNA, 20 nt, synthetic construct
  misc_feature 1..20: note = spacer sequence
  source 1..20: mol_type = other RNA
taaagtggctttaaaattgc

SEQ ID NO: 5886 - RNA, 20 nt, synthetic construct
  misc_feature 1..20: note = spacer sequence
  source 1..20: mol_type = other RNA
gccagtaggcaggttgctaa

SEQ ID NO: 5887 - RNA, 20 nt, synthetic construct
  misc_feature 1..20: note = spacer sequence
  source 1..20: mol_type = other RNA
tagcaacctgcctactggca

SEQ ID NO: 5888 - RNA, 20 nt, synthetic construct
  misc_feature 1..20: note = spacer sequence
  source 1..20: mol_type = other RNA
gagacaaacttctgaacgac

SEQ ID NO: 5889 - RNA, 20 nt, synthetic construct
  misc_feature 1..20: note = spacer sequence
  source 1..20: mol_type = other RNA
gaccatcttagcaacctgcc

SEQ ID NO: 5890 - RNA, 20 nt, synthetic construct
  misc_feature 1..20: note = spacer sequence
  source 1..20: mol_type = other RNA
ctgaccatcttagcaacctg

SEQ ID NO: 5891 - RNA, 20 nt, synthetic construct
  misc_feature 1..20: note = spacer sequence
  source 1..20: mol_type = other RNA
gaacgactcttgtaaaatat

SEQ ID NO: 5892 - RNA, 20 nt, synthetic construct
  misc_feature 1..20: note = spacer sequence
  source 1..20: mol_type = other RNA
gaagtttgtctctgaccatc

SEQ ID NO: 5893 - RNA, 20 nt, synthetic construct
  misc_feature 1..20: note = spacer sequence
  source 1..20: mol_type = other RNA
ttcagaagtttgtctctgac

SEQ ID NO: 5894 - RNA, 20 nt, synthetic construct
  misc_feature 1..20: note = spacer sequence
  source 1..20: mol_type = other RNA
tgtaaaatatacagaaatat

SEQ ID NO: 5895 - RNA, 20 nt, synthetic construct
  misc_feature 1..20: note = spacer sequence
  source 1..20: mol_type = other RNA
gtatattttacaagagtcgt

SEQ ID NO: 5896 - RNA, 20 nt, synthetic construct
  misc_feature 1..20: note = spacer sequence
  source 1..20: mol_type = other RNA
gaacttttatcagtaaaatt

SEQ ID NO: 5897 - RNA, 20 nt, synthetic construct
  misc_feature 1..20: note = spacer sequence
  source 1..20: mol_type = other RNA
gaaaatatttctgtatattt

SEQ ID NO: 5898 - RNA, 20 nt, synthetic construct
  misc_feature 1..20: note = spacer sequence
  source 1..20: mol_type = other RNA
gtaaaattacaaaacgtgtt

SEQ ID NO: 5899 - RNA, 20 nt, synthetic construct
  misc_feature 1..20: note = spacer sequence
  source 1..20: mol_type = other RNA
ttgcaacacgttttgtaatt

SEQ ID NO: 5900 - RNA, 20 nt, synthetic construct
  misc_feature 1..20: note = spacer sequence
  source 1..20: mol_type = other RNA
caagcaccttccttgcaaca

SEQ ID NO: 5901 - RNA, 20 nt, synthetic construct
  misc_feature 1..20: note = spacer sequence
  source 1..20: mol_type = other RNA
ccagaaccttagtgaagtta

SEQ ID NO: 5902 - RNA, 20 nt, synthetic construct
  misc_feature 1..20: note = spacer sequence
  source 1..20: mol_type = other RNA
ggggacagtgttatcacaag

SEQ ID NO: 5903 - RNA, 20 nt, synthetic construct
  misc_feature 1..20: note = spacer sequence
  source 1..20: mol_type = other RNA
ctaaggttctggggacagtg

SEQ ID NO: 5904 - RNA, 20 nt, synthetic construct
  misc_feature 1..20: note = spacer sequence
  source 1..20: mol_type = other RNA
accagttggtaacttcacta

SEQ ID NO: 5905 - RNA, 20 nt, synthetic construct
  misc_feature 1..20: note = spacer sequence
  source 1..20: mol_type = other RNA
cttgcactcggcttaaaaat

SEQ ID NO: 5906 - RNA, 20 nt, synthetic construct
  misc_feature 1..20: note = spacer sequence
  source 1..20: mol_type = other RNA
tgcactcggcttaaaaatca

SEQ ID NO: 5907 - RNA, 20 nt, synthetic construct
  misc_feature 1..20: note = spacer sequence
  source 1..20: mol_type = other RNA
gcttaaaaatcatgagggaa

SEQ ID NO: 5908 - RNA, 20 nt, synthetic construct
  misc_feature 1..20: note = spacer sequence
  source 1..20: mol_type = other RNA
tgagggaatatttactatac

SEQ ID NO: 5909 - RNA, 20 nt, synthetic construct
  misc_feature 1..20: note = spacer sequence
  source 1..20: mol_type = other RNA
tgatttttaagccgagtgca

SEQ ID NO: 5910 - RNA, 20 nt, synthetic construct
  misc_feature 1..20: note = spacer sequence
  source 1..20: mol_type = other RNA
ctcatgatttttaagccgag

SEQ ID NO: 5911 - RNA, 20 nt, synthetic construct
  misc_feature 1..20: note = spacer sequence
  source 1..20: mol_type = other RNA
tatagtaaatattccctcat

SEQ ID NO: 5912 - RNA, 20 nt, synthetic construct
  misc_feature 1..20: note = spacer sequence
  source 1..20: mol_type = other RNA
ttcgtatagtaaatattccc

SEQ ID NO: 5913 - RNA, 20 nt, synthetic construct
  misc_feature 1..20: note = spacer sequence
  source 1..20: mol_type = other RNA
cattcgtatagtaaatattc

SEQ ID NO: 5914 - RNA, 20 nt, synthetic construct
  misc_feature 1..20: note = spacer sequence
  source 1..20: mol_type = other RNA
gtctttaaaggggtttacag

SEQ ID NO: 5915 - RNA, 20 nt, synthetic construct
  misc_feature 1..20: note = spacer sequence
  source 1..20: mol_type = other RNA
ttaaaggggtttacagaaac

SEQ ID NO: 5916 - RNA, 20 nt, synthetic construct
  misc_feature 1..20: note = spacer sequence
  source 1..20: mol_type = other RNA
gtaaacccctttaaagactg

SEQ ID NO: 5917 - RNA, 20 nt, synthetic construct
  misc_feature 1..20: note = spacer sequence
  source 1..20: mol_type = other RNA
cgtttctgtaaaccccttta

SEQ ID NO: 5918 - RNA, 20 nt, synthetic construct
  misc_feature 1..20: note = spacer sequence
  source 1..20: mol_type = other RNA
cacgtttctgtaaacccctt

SEQ ID NO: 5919 - RNA, 20 nt, synthetic construct
  misc_feature 1..20: note = spacer sequence
  source 1..20: mol_type = other RNA
tctcacgtttctgtaaaccc

SEQ ID NO: 5920 - RNA, 20 nt, synthetic construct
  misc_feature 1..20: note = spacer sequence
  source 1..20: mol_type = other RNA
tgtcctctcacgtttctgta

SEQ ID NO: 5921 - RNA, 20 nt, synthetic construct
  misc_feature 1..20: note = spacer sequence
  source 1..20: mol_type = other RNA
gtgtaaatgtctgaaatata

SEQ ID NO: 5922 - RNA, 20 nt, synthetic construct
  misc_feature 1..20: note = spacer sequence
  source 1..20: mol_type = other RNA
gaaatatatgtgagggagat

SEQ ID NO: 5923 - RNA, 20 nt, synthetic construct
  misc_feature 1..20: note = spacer sequence
  source 1..20: mol_type = other RNA
gacatttacacagactaact

SEQ ID NO: 5924 - RNA, 20 nt, synthetic construct
  misc_feature 1..20: note = spacer sequence
  source 1..20: mol_type = other RNA
catatatttcagacatttac

SEQ ID NO: 5925 - RNA, 20 nt, synthetic construct
  misc_feature 1..20: note = spacer sequence
  source 1..20: mol_type = other RNA
ctcacatatatttcagacat

SEQ ID NO: 5926 - RNA, 20 nt, synthetic construct
  misc_feature 1..20: note = spacer sequence
  source 1..20: mol_type = other RNA
ccctcacatatatttcagac

SEQ ID NO: 5927 - RNA, 20 nt, synthetic construct
  misc_feature 1..20: note = spacer sequence
  source 1..20: mol_type = other RNA
ttatctccctcacatatatt

SEQ ID NO: 5928 - RNA, 20 nt, synthetic construct
  misc_feature 1..20: note = spacer sequence
  source 1..20: mol_type = other RNA
ttaataggtctccagatttt

SEQ ID NO: 5929 - RNA, 20 nt, synthetic construct
  misc_feature 1..20: note = spacer sequence
  source 1..20: mol_type = other RNA
ccagattttctggaaaaggt

SEQ ID NO: 5930 - RNA, 20 nt, synthetic construct
  misc_feature 1..20: note = spacer sequence
  source 1..20: mol_type = other RNA
agattttctggaaaaggttc

SEQ ID NO: 5931 - RNA, 20 nt, synthetic construct
  misc_feature 1..20: note = spacer sequence
  source 1..20: mol_type = other RNA
ggagacctattaaagaaaaa

SEQ ID NO: 5932 - RNA, 20 nt, synthetic construct
  misc_feature 1..20: note = spacer sequence
  source 1..20: mol_type = other RNA
ggaaaaggttctttggcatt

SEQ ID NO: 5933 - RNA, 20 nt, synthetic construct
  misc_feature 1..20: note = spacer sequence
  source 1..20: mol_type = other RNA
agaaaatctggagacctatt

SEQ ID NO: 5934 - RNA, 20 nt, synthetic construct
  misc_feature 1..20: note = spacer sequence
  source 1..20: mol_type = other RNA
ttggcatttgactccatttt

SEQ ID NO: 5935 - RNA, 20 nt, synthetic construct
  misc_feature 1..20: note = spacer sequence
  source 1..20: mol_type = other RNA
aatgccaaagaaccttttcc

SEQ ID NO: 5936 - RNA, 20 nt, synthetic construct
  misc_feature 1..20: note = spacer sequence
  source 1..20: mol_type = other RNA
attttgctgtttcatttgtc

SEQ ID NO: 5937 - RNA, 20 nt, synthetic construct
  misc_feature 1..20: note = spacer sequence
  source 1..20: mol_type = other RNA
tttgtcagacttctttttgt

SEQ ID NO: 5938 - RNA, 20 nt, synthetic construct
  misc_feature 1..20: note = spacer sequence
  source 1..20: mol_type = other RNA
gacttctttttgtccctctt

SEQ ID NO: 5939 - RNA, 20 nt, synthetic construct
  misc_feature 1..20: note = spacer sequence
  source 1..20: mol_type = other RNA
gacaaatgaaacagcaaaat

SEQ ID NO: 5940 - RNA, 20 nt, synthetic construct
  misc_feature 1..20: note = spacer sequence
  source 1..20: mol_type = other RNA
ttttgtccctctttacttct

SEQ ID NO: 5941 - RNA, 20 nt, synthetic construct
  misc_feature 1..20: note = spacer sequence
  source 1..20: mol_type = other RNA
ctctttacttctccccacat

SEQ ID NO: 5942 - RNA, 20 nt, synthetic construct
  misc_feature 1..20: note = spacer sequence
  source 1..20: mol_type = other RNA
ttacttctccccacataatt

SEQ ID NO: 5943 - RNA, 20 nt, synthetic construct
  misc_feature 1..20: note = spacer sequence
  source 1..20: mol_type = other RNA
ccccacataattcaccagta

SEQ ID NO: 5944 - RNA, 20 nt, synthetic construct
  misc_feature 1..20: note = spacer sequence
  source 1..20: mol_type = other RNA
ccacataattcaccagtact

SEQ ID NO: 5945 - RNA, 20 nt, synthetic construct
  misc_feature 1..20: note = spacer sequence
  source 1..20: mol_type = other RNA
ccagtactagtgttttgttt

SEQ ID NO: 5946 - RNA, 20 nt, synthetic construct
  misc_feature 1..20: note = spacer sequence
  source 1..20: mol_type = other RNA
gaccaagtctcgctctgtcg

SEQ ID NO: 5947 - RNA, 20 nt, synthetic construct
  misc_feature 1..20: note = spacer sequence
  source 1..20: mol_type = other RNA
gaaaaacaaaacactagtac

SEQ ID NO: 5948 - RNA, 20 nt, synthetic construct
  misc_feature 1..20: note = spacer sequence
  source 1..20: mol_type = other RNA
cgctctgtcgcccaggctgg

SEQ ID NO: 5949 - RNA, 20 nt, synthetic construct
  misc_feature 1..20: note = spacer sequence
  source 1..20: mol_type = other RNA
ctctgtcgcccaggctggag

SEQ ID NO: 5950 - RNA, 20 nt, synthetic construct
  misc_feature 1..20: note = spacer sequence
  source 1..20: mol_type = other RNA
gtcgcccaggctggagtgca

SEQ ID NO: 5951 - RNA, 20 nt, synthetic construct
  misc_feature 1..20: note = spacer sequence
  source 1..20: mol_type = other RNA
cccaggctggagtgcagtgg

SEQ ID NO: 5952 - RNA, 20 nt, synthetic construct
  misc_feature 1..20: note = spacer sequence
  source 1..20: mol_type = other RNA
agcctgggcgacagagcgag

SEQ ID NO: 5953 - RNA, 20 nt, synthetic construct
  misc_feature 1..20: note = spacer sequence
  source 1..20: mol_type = other RNA
cgccactgcactccagcctg

SEQ ID NO: 5954 - RNA, 20 nt, synthetic construct
  misc_feature 1..20: note = spacer sequence
  source 1..20: mol_type = other RNA
cagctcactgcaacctccgc

SEQ ID NO: 5955 - RNA, 20 nt, synthetic construct
  misc_feature 1..20: note = spacer sequence
  source 1..20: mol_type = other RNA
gctcactgcaacctccgcct

SEQ ID NO: 5956 - RNA, 20 nt, synthetic construct
  misc_feature 1..20: note = spacer sequence
  source 1..20: mol_type = other RNA
ctgcaacctccgcctcccag

SEQ ID NO: 5957 - RNA, 20 nt, synthetic construct
  misc_feature 1..20: note = spacer sequence
  source 1..20: mol_type = other RNA
gcctcccaggttcaagcaat

SEQ ID NO: 5958 - RNA, 20 nt, synthetic construct
  misc_feature 1..20: note = spacer sequence
  source 1..20: mol_type = other RNA
caggttcaagcaattctcct

SEQ ID NO: 5959 - RNA, 20 nt, synthetic construct
  misc_feature 1..20: note = spacer sequence
  source 1..20: mol_type = other RNA
agcaattctcctgcctcagc

SEQ ID NO: 5960 - RNA, 20 nt, synthetic construct
  misc_feature 1..20: note = spacer sequence
  source 1..20: mol_type = other RNA
cctgcctcagcctcccgggt

SEQ ID NO: 5961 - RNA, 20 nt, synthetic construct
  misc_feature 1..20: note = spacer sequence
  source 1..20: mol_type = other RNA
tgcctcagcctcccgggtag

SEQ ID NO: 5962 - RNA, 20 nt, synthetic construct
  misc_feature 1..20: note = spacer sequence
  source 1..20: mol_type = other RNA
gcctcccgggtagctgggac

SEQ ID NO: 5963 - RNA, 20 nt, synthetic construct
  misc_feature 1..20: note = spacer sequence
  source 1..20: mol_type = other RNA
cgggtagctgggactacagg

SEQ ID NO: 5964 - RNA, 20 nt, synthetic construct
  misc_feature 1..20: note = spacer sequence
  source 1..20: mol_type = other RNA
cagctacccgggaggctgag

SEQ ID NO: 5965 - RNA, 20 nt, synthetic construct
  misc_feature 1..20: note = spacer sequence
  source 1..20: mol_type = other RNA
actaaaatataaaaaattag

SEQ ID NO: 5966 - RNA, 20 nt, synthetic construct
  misc_feature 1..20: note = spacer sequence
  source 1..20: mol_type = other RNA
ctactaaaatataaaaaatt

SEQ ID NO: 5967 - RNA, 20 nt, synthetic construct
  misc_feature 1..20: note = spacer sequence
  source 1..20: mol_type = other RNA
ccatgttggccaggatggtc

SEQ ID NO: 5968 - RNA, 20 nt, synthetic construct
  misc_feature 1..20: note = spacer sequence
  source 1..20: mol_type = other RNA
tggccaacatggtgaaacgc

SEQ ID NO: 5969 - RNA, 20 nt, synthetic construct
  misc_feature 1..20: note = spacer sequence
  source 1..20: mol_type = other RNA
cgatctgttgacgtcgtgat

SEQ ID NO: 5970 - RNA, 20 nt, synthetic construct
  misc_feature 1..20: note = spacer sequence
  source 1..20: mol_type = other RNA
atctgttgacgtcgtgatcc

SEQ ID NO: 5971 - RNA, 20 nt, synthetic construct
  misc_feature 1..20: note = spacer sequence
  source 1..20: mol_type = other RNA
agaccatcctggccaacatg

SEQ ID NO: 5972 - RNA, 20 nt, synthetic construct
  misc_feature 1..20: note = spacer sequence
  source 1..20: mol_type = other RNA
gttgacgtcgtgatccaccc

SEQ ID NO: 5973 - RNA, 20 nt, synthetic construct
  misc_feature 1..20: note = spacer sequence
  source 1..20: mol_type = other RNA
acagatcgagaccatcctgg

SEQ ID NO: 5974 - RNA, 20 nt, synthetic construct
  misc_feature 1..20: note = spacer sequence
  source 1..20: mol_type = other RNA
tgatccacccgcctcggcct

SEQ ID NO: 5975 - RNA, 20 nt, synthetic construct
  misc_feature 1..20: note = spacer sequence
  source 1..20: mol_type = other RNA
cgacgtcaacagatcgagac

SEQ ID NO: 5976 - RNA, 20 nt, synthetic construct
  misc_feature 1..20: note = spacer sequence
  source 1..20: mol_type = other RNA
acccgcctcggcctcccaaa

SEQ ID NO: 5977 - RNA, 20 nt, synthetic construct
  misc_feature 1..20: note = spacer sequence
  source 1..20: mol_type = other RNA
gcctcccaaagtgctgggat

SEQ ID NO: 5978 - RNA, 20 nt, synthetic construct
  misc_feature 1..20: note = spacer sequence
  source 1..20: mol_type = other RNA
caaagtgctgggattacagg

SEQ ID NO: 5979 - RNA, 20 nt, synthetic construct
  misc_feature 1..20: note = spacer sequence
  source 1..20: mol_type = other RNA
cagcactttgggaggccgag

SEQ ID NO: 5980 - RNA, 20 nt, synthetic construct
  misc_feature 1..20: note = spacer sequence
  source 1..20: mol_type = other RNA
cgcctgtaatcccagcactt

SEQ ID NO: 5981 - RNA, 20 nt, synthetic construct
  misc_feature 1..20: note = spacer sequence
  source 1..20: mol_type = other RNA
taagacgcctctgaggaatc

SEQ ID NO: 5982 - RNA, 20 nt, synthetic construct
  misc_feature 1..20: note = spacer sequence
  source 1..20: mol_type = other RNA
taagaatagcactggtggcc

SEQ ID NO: 5983 - RNA, 20 nt, synthetic construct
  misc_feature 1..20: note = spacer sequence
  source 1..20: mol_type = other RNA
gaggaatcccttctccctgg

SEQ ID NO: 5984 - RNA, 20 nt, synthetic construct
  misc_feature 1..20: note = spacer sequence
  source 1..20: mol_type = other RNA
gaggcgtcttaagaatagca

SEQ ID NO: 5985 - RNA, 20 nt, synthetic construct
  misc_feature 1..20: note = spacer sequence
  source 1..20: mol_type = other RNA
tcagaggcgtcttaagaata

SEQ ID NO: 5986 - RNA, 20 nt, synthetic construct
  misc_feature 1..20: note = spacer sequence
  source 1..20: mol_type = other RNA
cttctccctggccattgaga

SEQ ID NO: 5987 - RNA, 20 nt, synthetic construct
  misc_feature 1..20: note = spacer sequence
  source 1..20: mol_type = other RNA
ccctggccattgagaatcca

SEQ ID NO: 5988 - RNA, 20 nt, synthetic construct
  misc_feature 1..20: note = spacer sequence
  source 1..20: mol_type = other RNA
ctggccattgagaatccatg

SEQ ID NO: 5989 - RNA, 20 nt, synthetic construct
  misc_feature 1..20: note = spacer sequence
  source 1..20: mol_type = other RNA
atggccagggagaagggatt

SEQ ID NO: 5990 - RNA, 20 nt, synthetic construct
  misc_feature 1..20: note = spacer sequence
  source 1..20: mol_type = other RNA
caatggccagggagaaggga

SEQ ID NO: 5991 - RNA, 20 nt, synthetic construct
  misc_feature 1..20: note = spacer sequence
  source 1..20: mol_type = other RNA
atgcatgaacccaggttttc

SEQ ID NO: 5992 - RNA, 20 nt, synthetic construct
  misc_feature 1..20: note = spacer sequence
  source 1..20: mol_type = other RNA
tgcatggattctcaatggcc

SEQ ID NO: 5993 - RNA, 20 nt, synthetic construct
  misc_feature 1..20: note = spacer sequence
  source 1..20: mol_type = other RNA
accttccctgagcagcttgc

SEQ ID NO: 5994 - RNA, 20 nt, synthetic construct
  misc_feature 1..20: note = spacer sequence
  source 1..20: mol_type = other RNA
ctgagcagcttgcatagttc

SEQ ID NO: 5995 - RNA, 20 nt, synthetic construct
  misc_feature 1..20: note = spacer sequence
  source 1..20: mol_type = other RNA
gggaaggtggaaaacctggg

SEQ ID NO: 5996 - RNA, 20 nt, synthetic construct
  misc_feature 1..20: note = spacer sequence
  source 1..20: mol_type = other RNA
ttcttttaagcgcctgactt

SEQ ID NO: 5997 - RNA, 20 nt, synthetic construct
  misc_feature 1..20: note = spacer sequence
  source 1..20: mol_type = other RNA
tttaagcgcctgacttcgtt

SEQ ID NO: 5998 - RNA, 20 nt, synthetic construct
  misc_feature 1..20: note = spacer sequence
  source 1..20: mol_type = other RNA
ggcgcttaaaagaaggaact

SEQ ID NO: 5999 - RNA, 20 nt, synthetic construct
  misc_feature 1..20: note = spacer sequence
  source 1..20: mol_type = other RNA
ttttgtttggtgcccgttgt

SEQ ID NO: 6000 - RNA, 20 nt, synthetic construct
  misc_feature 1..20: note = spacer sequence
  source 1..20: mol_type = other RNA
ggtacaacgggcaccaaaca

SEQ ID NO: 6001 - RNA, 20 nt, synthetic construct
  misc_feature 1..20: note = spacer sequence
  source 1..20: mol_type = other RNA
caggtacaacgggcaccaaa

SEQ ID NO: 6002 - RNA, 20 nt, synthetic construct
  misc_feature 1..20: note = spacer sequence
  source 1..20: mol_type = other RNA
ttctcaggtacaacgggcac

SEQ ID NO: 6003 - RNA, 20 nt, synthetic construct
  misc_feature 1..20: note = spacer sequence
  source 1..20: mol_type = other RNA
aaggctcattctcaggtaca

SEQ ID NO: 6004 - RNA, 20 nt, synthetic construct
  misc_feature 1..20: note = spacer sequence
  source 1..20: mol_type = other RNA
actatccaaggctcattctc

SEQ ID NO: 6005 - RNA, 20 nt, synthetic construct
  misc_feature 1..20: note = spacer sequence
  source 1..20: mol_type = other RNA
agctttccagatatgcagag

SEQ ID NO: 6006 - RNA, 20 nt, synthetic construct
  misc_feature 1..20: note = spacer sequence
  source 1..20: mol_type = other RNA
agatatgcagagataataca

SEQ ID NO: 6007 - RNA, 20 nt, synthetic construct
  misc_feature 1..20: note = spacer sequence
  source 1..20: mol_type = other RNA
ggaaagctggaatgctccac

SEQ ID NO: 6008 - RNA, 20 nt, synthetic construct
  misc_feature 1..20: note = spacer sequence
  source 1..20: mol_type = other RNA
gcatatctggaaagctggaa

SEQ ID NO: 6009 - RNA, 20 nt, synthetic construct
  misc_feature 1..20: note = spacer sequence
  source 1..20: mol_type = other RNA
ctgcatatctggaaagctgg

SEQ ID NO: 6010 - RNA, 20 nt, synthetic construct
  misc_feature 1..20: note = spacer sequence
  source 1..20: mol_type = other RNA
gctacttggcttggcctatt

SEQ ID NO: 6011 - RNA, 20 nt, synthetic construct
  misc_feature 1..20: note = spacer sequence
  source 1..20: mol_type = other RNA
gtgtttaaaatcttggactc

SEQ ID NO: 6012 - RNA, 20 nt, synthetic construct
  misc_feature 1..20: note = spacer sequence
  source 1..20: mol_type = other RNA
tggactctttgctagttttt

SEQ ID NO: 6013 - RNA, 20 nt, synthetic construct
  misc_feature 1..20: note = spacer sequence
  source 1..20: mol_type = other RNA
aagattttaaacacggaata

SEQ ID NO: 6014 - RNA, 20 nt, synthetic construct
  misc_feature 1..20: note = spacer sequence
  source 1..20: mol_type = other RNA
ttgctagtttttacagatca

SEQ ID NO: 6015 - RNA, 20 nt, synthetic construct
  misc_feature 1..20: note = spacer sequence
  source 1..20: mol_type = other RNA
gtaaaaactagcaaagagtc

SEQ ID NO: 6016 - RNA, 20 nt, synthetic construct
  misc_feature 1..20: note = spacer sequence
  source 1..20: mol_type = other RNA
gaatttttcacgtattaatc

SEQ ID NO: 6017 - RNA, 20 nt, synthetic construct
  misc_feature 1..20: note = spacer sequence
  source 1..20: mol_type = other RNA
gatctgtaaaaactagcaaa

SEQ ID NO: 6018 - RNA, 20 nt, synthetic construct
  misc_feature 1..20: note = spacer sequence
  source 1..20: mol_type = other RNA
cgtattaatccagttttcct

SEQ ID NO: 6019 - RNA, 20 nt, synthetic construct
  misc_feature 1..20: note = spacer sequence
  source 1..20: mol_type = other RNA
agttttcctagcttctcttg

SEQ ID NO: 6020 - RNA, 20 nt, synthetic construct
  misc_feature 1..20: note = spacer sequence
  source 1..20: mol_type = other RNA
tagcttctcttgaagaattt

SEQ ID NO: 6021 - RNA, 20 nt, synthetic construct
  misc_feature 1..20: note = spacer sequence
  source 1..20: mol_type = other RNA
cttgaagaatttttggagat

SEQ ID NO: 6022 - RNA, 20 nt, synthetic construct
  misc_feature 1..20: note = spacer sequence
  source 1..20: mol_type = other RNA
tgaagaatttttggagatct

SEQ ID NO: 6023 - RNA, 20 nt, synthetic construct
  misc_feature 1..20: note = spacer sequence
  source 1..20: mol_type = other RNA
agagaagctaggaaaactgg

SEQ ID NO: 6024 - RNA, 20 nt, synthetic construct
  misc_feature 1..20: note = spacer sequence
  source 1..20: mol_type = other RNA
tcaagagaagctaggaaaac

SEQ ID NO: 6025 - RNA, 20 nt, synthetic construct
  misc_feature 1..20: note = spacer sequence
  source 1..20: mol_type = other RNA
aaaaattcttcaagagaagc

SEQ ID NO: 6026 - RNA, 20 nt, synthetic construct
  misc_feature 1..20: note = spacer sequence
  source 1..20: mol_type = other RNA
ccaaaaattcttcaagagaa

SEQ ID NO: 6027 - RNA, 20 nt, synthetic construct
  misc_feature 1..20: note = spacer sequence
  source 1..20: mol_type = other RNA
cttcatactgagccttcatt

SEQ ID NO: 6028 - RNA, 20 nt, synthetic construct
  misc_feature 1..20: note = spacer sequence
  source 1..20: mol_type = other RNA
tcatactgagccttcattag

SEQ ID NO: 6029 - RNA, 20 nt, synthetic construct
  misc_feature 1..20: note = spacer sequence
  source 1..20: mol_type = other RNA
tactgagccttcattagccc

SEQ ID NO: 6030 - RNA, 20 nt, synthetic construct
  misc_feature 1..20: note = spacer sequence
  source 1..20: mol_type = other RNA
gtatgaagagatctccaaaa

SEQ ID NO: 6031 - RNA, 20 nt, synthetic construct
  misc_feature 1..20: note = spacer sequence
  source 1..20: mol_type = other RNA
ttagcccaggacagtactgc

SEQ ID NO: 6032 - RNA, 20 nt, synthetic construct
  misc_feature 1..20: note = spacer sequence
  source 1..20: mol_type = other RNA
tgggctaatgaaggctcagt

SEQ ID NO: 6033 - RNA, 20 nt, synthetic construct
  misc_feature 1..20: note = spacer sequence
  source 1..20: mol_type = other RNA
tatattttttcgcttcccag

SEQ ID NO: 6034 - RNA, 20 nt, synthetic construct
  misc_feature 1..20: note = spacer sequence
  source 1..20: mol_type = other RNA
cttcccaggcctgtgttatt

SEQ ID NO: 6035 - RNA, 20 nt, synthetic construct
  misc_feature 1..20: note = spacer sequence
  source 1..20: mol_type = other RNA
caggcctgtgttattcactt

SEQ ID NO: 6036 - RNA, 20 nt, synthetic construct
  misc_feature 1..20: note = spacer sequence
  source 1..20: mol_type = other RNA
cttaagttcatagcctggtc

SEQ ID NO: 6037 - RNA, 20 nt, synthetic construct
  misc_feature 1..20: note = spacer sequence
  source 1..20: mol_type = other RNA
tagcctggtccctgcagggt

SEQ ID NO: 6038 - RNA, 20 nt, synthetic construct
  misc_feature 1..20: note = spacer sequence
  source 1..20: mol_type = other RNA
ctgcagggttgtacccgagc

SEQ ID NO: 6039 - RNA, 20 nt, synthetic construct
  misc_feature 1..20: note = spacer sequence
  source 1..20: mol_type = other RNA
ggtacaaccctgcagggacc

SEQ ID NO: 6040 - RNA, 20 nt, synthetic construct
  misc_feature 1..20: note = spacer sequence
  source 1..20: mol_type = other RNA
aagtagctgtgctcgggtac

SEQ ID NO: 6041 - RNA, 20 nt, synthetic construct
  misc_feature 1..20: note = spacer sequence
  source 1..20: mol_type = other RNA
tgaatgtattaccggttaaa

SEQ ID NO: 6042 - RNA, 20 nt, synthetic construct
  misc_feature 1..20: note = spacer sequence
  source 1..20: mol_type = other RNA
ggacatctaagtagctgtgc

SEQ ID NO: 6043 - RNA, 20 nt, synthetic construct
  misc_feature 1..20: note = spacer sequence
  source 1..20: mol_type = other RNA
atttaaccggtaatacattc

SEQ ID NO: 6044 - RNA, 20 nt, synthetic construct
  misc_feature 1..20: note = spacer sequence
  source 1..20: mol_type = other RNA
aagaacctgctgtttttggc

SEQ ID NO: 6045 - RNA, 20 nt, synthetic construct
  misc_feature 1..20: note = spacer sequence
  source 1..20: mol_type = other RNA
ttgaaacctccatttaaccg

SEQ ID NO: 6046 - RNA, 20 nt, synthetic construct
  misc_feature 1..20: note = spacer sequence
  source 1..20: mol_type = other RNA
tgataacagagtgtttgagg

SEQ ID NO: 6047 - RNA, 20 nt, synthetic construct
  misc_feature 1..20: note = spacer sequence
  source 1..20: mol_type = other RNA
agagcacagggccaaaaaca

SEQ ID NO: 6048 - RNA, 20 nt, synthetic construct
  misc_feature 1..20: note = spacer sequence
  source 1..20: mol_type = other RNA
gttatcaagagcacagggcc

SEQ ID NO: 6049 - RNA, 20 nt, synthetic construct
  misc_feature 1..20: note = spacer sequence
  source 1..20: mol_type = other RNA
aacactctgttatcaagagc

SEQ ID NO: 6050 - RNA, 20 nt, synthetic construct
  misc_feature 1..20: note = spacer sequence
  source 1..20: mol_type = other RNA
ctcaaacactctgttatcaa

SEQ ID NO: 6051 - RNA, 20 nt, synthetic construct
  misc_feature 1..20: note = spacer sequence
  source 1..20: mol_type = other RNA
catttgagtttttccaaaat

SEQ ID NO: 6052 - RNA, 20 nt, synthetic construct
  misc_feature 1..20: note = spacer sequence
  source 1..20: mol_type = other RNA
aatgtgaaagttgtccctca

SEQ ID NO: 6053 - RNA, 20 nt, synthetic construct
  misc_feature 1..20: note = spacer sequence
  source 1..20: mol_type = other RNA
aaaattaaaggttgtagaag

SEQ ID NO: 6054 - RNA, 20 nt, synthetic construct
  misc_feature 1..20: note = spacer sequence
  source 1..20: mol_type = other RNA
acaacctttaattttggaaa

SEQ ID NO: 6055 - RNA, 20 nt, synthetic construct
  misc_feature 1..20: note = spacer sequence
  source 1..20: mol_type = other RNA
tctacaacctttaattttgg

SEQ ID NO: 6056 - RNA, 20 nt, synthetic construct
  misc_feature 1..20: note = spacer sequence
  source 1..20: mol_type = other RNA
cagtatctattgtcaaaaag

SEQ ID NO: 6057 - RNA, 20 nt, synthetic construct
  misc_feature 1..20: note = spacer sequence
  source 1..20: mol_type = other RNA
attgtcaaaaagaaaagaat

SEQ ID NO: 6058 - RNA, 20 nt, synthetic construct
  misc_feature 1..20: note = spacer sequence
  source 1..20: mol_type = other RNA
aaaagaaaagaatttaaaaa

SEQ ID NO: 6059 - RNA, 20 nt, synthetic construct
  misc_feature 1..20: note = spacer sequence
  source 1..20: mol_type = other RNA
ttttgacaatagatactgtg

SEQ ID NO: 6060 - RNA, 20 nt, synthetic construct
  misc_feature 1..20: note = spacer sequence
  source 1..20: mol_type = other RNA
tttctttttgacaatagata

SEQ ID NO: 6061 - RNA, 20 nt, synthetic construct
  misc_feature 1..20: note = spacer sequence
  source 1..20: mol_type = other RNA
tggcaattgctgccttttta

SEQ ID NO: 6062 - RNA, 20 nt, synthetic construct
  misc_feature 1..20: note = spacer sequence
  source 1..20: mol_type = other RNA
tttgagcaatgatattttcc

SEQ ID NO: 6063 - RNA, 20 nt, synthetic construct
  misc_feature 1..20: note = spacer sequence
  source 1..20: mol_type = other RNA
aatgaagtatcctggcaatt

SEQ ID NO: 6064 - RNA, 20 nt, synthetic construct
  misc_feature 1..20: note = spacer sequence
  source 1..20: mol_type = other RNA
ttgctcaaatgaagtatcct

SEQ ID NO: 6065 - RNA, 20 nt, synthetic construct
  misc_feature 1..20: note = spacer sequence
  source 1..20: mol_type = other RNA
agtggaaagtcacatcttaa

SEQ ID NO: 6066 - RNA, 20 nt, synthetic construct
  misc_feature 1..20: note = spacer sequence
  source 1..20: mol_type = other RNA
actggaaaatatcattgctc

SEQ ID NO: 6067 - RNA, 20 nt, synthetic construct
  misc_feature 1..20: note = spacer sequence
  source 1..20: mol_type = other RNA
catcttaagggttaatgccc

SEQ ID NO: 6068 - RNA, 20 nt, synthetic construct
  misc_feature 1..20: note = spacer sequence
  source 1..20: mol_type = other RNA
taagggttaatgccccttaa

SEQ ID NO: 6069 - RNA, 20 nt, synthetic construct
  misc_feature 1..20: note = spacer sequence
  source 1..20: mol_type = other RNA
aatacggccaacagttaagg

SEQ ID NO: 6070 - RNA, 20 nt, synthetic construct
  misc_feature 1..20: note = spacer sequence
  source 1..20: mol_type = other RNA
tgtttttagcttggtttgtt

SEQ ID NO: 6071 - RNA, 20 nt, synthetic construct
  misc_feature 1..20: note = spacer sequence
  source 1..20: mol_type = other RNA
cttgtttttagcttggtttg

SEQ ID NO: 6072 - RNA, 20 nt, synthetic construct
  misc_feature 1..20: note = spacer sequence
  source 1..20: mol_type = other RNA
gtgtctcttgtttttagctt

SEQ ID NO: 6073 - RNA, 20 nt, synthetic construct
  misc_feature 1..20: note = spacer sequence
  source 1..20: mol_type = other RNA
tacaacatgtcagtgtctct

SEQ ID NO: 6074 - RNA, 20 nt, synthetic construct
  misc_feature 1..20: note = spacer sequence
  source 1..20: mol_type = other RNA
acaccacaccgtcatacaac

SEQ ID NO: 6075 - RNA, 20 nt, synthetic construct
  misc_feature 1..20: note = spacer sequence
  source 1..20: mol_type = other RNA
tgagatctagttgtaacttc

SEQ ID NO: 6076 - RNA, 20 nt, synthetic construct
  misc_feature 1..20: note = spacer sequence
  source 1..20: mol_type = other RNA
ggactaaaataaacacaaca

SEQ ID NO: 6077 - RNA, 20 nt, synthetic construct
  misc_feature 1..20: note = spacer sequence
  source 1..20: mol_type = other RNA
caggactaaaataaacacaa

SEQ ID NO: 6078 - RNA, 20 nt, synthetic construct
  misc_feature 1..20: note = spacer sequence
  source 1..20: mol_type = other RNA
agttgtaacttccttgattt

SEQ ID NO: 6079 - RNA, 20 nt, synthetic construct
  misc_feature 1..20: note = spacer sequence
  source 1..20: mol_type = other RNA
ttgatttctgtatgtagcca

SEQ ID NO: 6080 - RNA, 20 nt, synthetic construct
  misc_feature 1..20: note = spacer sequence
  source 1..20: mol_type = other RNA
aggaagttacaactagatct

SEQ ID NO: 6081 - RNA, 20 nt, synthetic construct
  misc_feature 1..20: note = spacer sequence
  source 1..20: mol_type = other RNA
gtatgtagccacggagcacc

SEQ ID NO: 6082 - RNA, 20 nt, synthetic construct
  misc_feature 1..20: note = spacer sequence
  source 1..20: mol_type = other RNA
gtggctacatacagaaatca

SEQ ID NO: 6083 - RNA, 20 nt, synthetic construct
  misc_feature 1..20: note = spacer sequence
  source 1..20: mol_type = other RNA
ccattacctgaatggctata

SEQ ID NO: 6084 - RNA, 20 nt, synthetic construct
  misc_feature 1..20: note = spacer sequence
  source 1..20: mol_type = other RNA
ggtaatggtgacaggtaatg

SEQ ID NO: 6085 - RNA, 20 nt, synthetic construct
  misc_feature 1..20: note = spacer sequence
  source 1..20: mol_type = other RNA
ttttggtagagtggaaaggt

SEQ ID NO: 6086 - RNA, 20 nt, synthetic construct
  misc_feature 1..20: note = spacer sequence
  source 1..20: mol_type = other RNA
accaaaatgaaagcaagcag

SEQ ID NO: 6087 - RNA, 20 nt, synthetic construct
  misc_feature 1..20: note = spacer sequence
  source 1..20: mol_type = other RNA
actctaccaaaatgaaagca

SEQ ID NO: 6088 - RNA, 20 nt, synthetic construct
  misc_feature 1..20: note = spacer sequence
  source 1..20: mol_type = other RNA
gtgcttgaaaagatttcaga

SEQ ID NO: 6089 - RNA, 20 nt, synthetic construct
  misc_feature 1..20: note = spacer sequence
  source 1..20: mol_type = other RNA
agcactgaaacctaggtaac

SEQ ID NO: 6090 - RNA, 20 nt, synthetic construct
  misc_feature 1..20: note = spacer sequence
  source 1..20: mol_type = other RNA
tttcaagcactgaaacctag

SEQ ID NO: 6091 - RNA, 20 nt, synthetic construct
  misc_feature 1..20: note = spacer sequence
  source 1..20: mol_type = other RNA
gaaagcagtagtacgtctgg

SEQ ID NO: 6092 - RNA, 20 nt, synthetic construct
  misc_feature 1..20: note = spacer sequence
  source 1..20: mol_type = other RNA
gaaatcttttcaagcactga

SEQ ID NO: 6093 - RNA, 20 nt, synthetic construct
  misc_feature 1..20: note = spacer sequence
  source 1..20: mol_type = other RNA
ggttagactagaatcagtcc

SEQ ID NO: 6094 - RNA, 20 nt, synthetic construct
  misc_feature 1..20: note = spacer sequence
  source 1..20: mol_type = other RNA
aaccagacgtactactgctt

SEQ ID NO: 6095 - RNA, 20 nt, synthetic construct
  misc_feature 1..20: note = spacer sequence
  source 1..20: mol_type = other RNA
agtctaaccagacgtactac

SEQ ID NO: 6096 - RNA, 20 nt, synthetic construct
  misc_feature 1..20: note = spacer sequence
  source 1..20: mol_type = other RNA
gtcctctcctgggggcagtg

SEQ ID NO: 6097 - RNA, 20 nt, synthetic construct
  misc_feature 1..20: note = spacer sequence
  source 1..20: mol_type = other RNA
tctcctgggggcagtggaat

SEQ ID NO: 6098 - RNA, 20 nt, synthetic construct
  misc_feature 1..20: note = spacer sequence
  source 1..20: mol_type = other RNA
cctgggggcagtggaatata

SEQ ID NO: 6099 - RNA, 20 nt, synthetic construct
  misc_feature 1..20: note = spacer sequence
  source 1..20: mol_type = other RNA
tgggggcagtggaatataat

SEQ ID NO: 6100 - RNA, 20 nt, synthetic construct
  misc_feature 1..20: note = spacer sequence
  source 1..20: mol_type = other RNA
actgcccccaggagaggact

SEQ ID NO: 6101 - RNA, 20 nt, synthetic construct
  misc_feature 1..20: note = spacer sequence
  source 1..20: mol_type = other RNA
gactgctaattaaaaatacc

SEQ ID NO: 6102 - RNA, 20 nt, synthetic construct
  misc_feature 1..20: note = spacer sequence
  source 1..20: mol_type = other RNA
gaaaatattatattccactg

SEQ ID NO: 6103 - RNA, 20 nt, synthetic construct
  misc_feature 1..20: note = spacer sequence
  source 1..20: mol_type = other RNA
caggtatttttaattagcag

SEQ ID NO: 6104 - RNA, 20 nt, synthetic construct
  misc_feature 1..20: note = spacer sequence
  source 1..20: mol_type = other RNA
cagcactttgggaggccgag

SEQ ID NO: 6105 - RNA, 20 nt, synthetic construct
  misc_feature 1..20: note = spacer sequence
  source 1..20: mol_type = other RNA
caaagtgctgggattacagg

SEQ ID NO: 6106 - RNA, 20 nt, synthetic construct
  misc_feature 1..20: note = spacer sequence
  source 1..20: mol_type = other RNA
gcctcccaaagtgctgggat

SEQ ID NO: 6107 - RNA, 20 nt, synthetic construct
  misc_feature 1..20: note = spacer sequence
  source 1..20: mol_type = other RNA
cggcctcccaaagtgctggg

SEQ ID NO: 6108 - RNA, 20 nt, synthetic construct
  misc_feature 1..20: note = spacer sequence
  source 1..20: mol_type = other RNA
acccgtctcggcctcccaaa

SEQ ID NO: 6109 - RNA, 20 nt, synthetic construct
  misc_feature 1..20: note = spacer sequence
  source 1..20: mol_type = other RNA
cgaggtcagcagatggagac

SEQ ID NO: 6110 - RNA, 20 nt, synthetic construct
  misc_feature 1..20: note = spacer sequence
  source 1..20: mol_type = other RNA
tgatccacccgtctcggcct

SEQ ID NO: 6111 - RNA, 20 nt, synthetic construct
  misc_feature 1..20: note = spacer sequence
  source 1..20: mol_type = other RNA
gcagatggagaccatcctgg

SEQ ID NO: 6112 - RNA, 20 nt, synthetic construct
  misc_feature 1..20: note = spacer sequence
  source 1..20: mol_type = other RNA
gctgacctcgtgatccaccc

SEQ ID NO: 6113 - RNA, 20 nt, synthetic construct
  misc_feature 1..20: note = spacer sequence
  source 1..20: mol_type = other RNA
atctgctgacctcgtgatcc

SEQ ID NO: 6114 - RNA, 20 nt, synthetic construct
  misc_feature 1..20: note = spacer sequence
  source 1..20: mol_type = other RNA
ccatctgctgacctcgtgat

SEQ ID NO: 6115 - RNA, 20 nt, synthetic construct
  misc_feature 1..20: note = spacer sequence
  source 1..20: mol_type = other RNA
tggctaacacggtgaaaccc

SEQ ID NO: 6116 - RNA, 20 nt, synthetic construct
  misc_feature 1..20: note = spacer sequence
  source 1..20: mol_type = other RNA
ccgtgttagccaggatggtc

SEQ ID NO: 6117 - RNA, 20 nt, synthetic construct
  misc_feature 1..20: note = spacer sequence
  source 1..20: mol_type = other RNA
ctactaaaaatgcaaaaaaa

SEQ ID NO: 6118 - RNA, 20 nt, synthetic construct
  misc_feature 1..20: note = spacer sequence
  source 1..20: mol_type = other RNA
actaaaaatgcaaaaaaatt

SEQ ID NO: 6119 - RNA, 20 nt, synthetic construct
  misc_feature 1..20: note = spacer sequence
  source 1..20: mol_type = other RNA
cagctactcaggaggctgag

SEQ ID NO: 6120 - RNA, 20 nt, synthetic construct
  misc_feature 1..20: note = spacer sequence
  source 1..20: mol_type = other RNA
ggaggctgaggcaggagaat

SEQ ID NO: 6121 - RNA, 20 nt, synthetic construct
  misc_feature 1..20: note = spacer sequence
  source 1..20: mol_type = other RNA
tgagtagctgggactacagg

SEQ ID NO: 6122 - RNA, 20 nt, synthetic construct
  misc_feature 1..20: note = spacer sequence
  source 1..20: mol_type = other RNA
gcctcctgagtagctgggac

SEQ ID NO: 6123 - RNA, 20 nt, synthetic construct
  misc_feature 1..20: note = spacer sequence
  source 1..20: mol_type = other RNA
tgcctcagcctcctgagtag

SEQ ID NO: 6124 - RNA, 20 nt, synthetic construct
  misc_feature 1..20: note = spacer sequence
  source 1..20: mol_type = other RNA
cctgcctcagcctcctgagt

SEQ ID NO: 6125 - RNA, 20 nt, synthetic construct
  misc_feature 1..20: note = spacer sequence
  source 1..20: mol_type = other RNA
tgccattctcctgcctcagc

SEQ ID NO: 6126 - RNA, 20 nt, synthetic construct
  misc_feature 1..20: note = spacer sequence
  source 1..20: mol_type = other RNA
caggttcatgccattctcct

SEQ ID NO: 6127 - RNA, 20 nt, synthetic construct
  misc_feature 1..20: note = spacer sequence
  source 1..20: mol_type = other RNA
gcctcccaggttcatgccat

SEQ ID NO: 6128 - RNA, 20 nt, synthetic construct
  misc_feature 1..20: note = spacer sequence
  source 1..20: mol_type = other RNA
ctgcaagctccgcctcccag

SEQ ID NO: 6129 - RNA, 20 nt, synthetic construct
  misc_feature 1..20: note = spacer sequence
  source 1..20: mol_type = other RNA
gctcactgcaagctccgcct

SEQ ID NO: 6130 - RNA, 20 nt, synthetic construct
  misc_feature 1..20: note = spacer sequence
  source 1..20: mol_type = other RNA
cggctcactgcaagctccgc

SEQ ID NO: 6131 - RNA, 20 nt, synthetic construct
  misc_feature 1..20: note = spacer sequence
  source 1..20: mol_type = other RNA
tgtcactgcactccagcctg

SEQ ID NO: 6132 - RNA, 20 nt, synthetic construct
  misc_feature 1..20: note = spacer sequence
  source 1..20: mol_type = other RNA
ctgcactccagcctgggcga

SEQ ID NO: 6133 - RNA, 20 nt, synthetic construct
  misc_feature 1..20: note = spacer sequence
  source 1..20: mol_type = other RNA
agcctgggcgacagagcgag

SEQ ID NO: 6134 - RNA, 20 nt, synthetic construct
  misc_feature 1..20: note = spacer sequence
  source 1..20: mol_type = other RNA
cccaggctggagtgcagtga

SEQ ID NO: 6135 - RNA, 20 nt, synthetic construct
  misc_feature 1..20: note = spacer sequence
  source 1..20: mol_type = other RNA
gtcgcccaggctggagtgca

SEQ ID NO: 6136 - RNA, 20 nt, synthetic construct
  misc_feature 1..20: note = spacer sequence
  source 1..20: mol_type = other RNA
ctctgtcgcccaggctggag

SEQ ID NO: 6137 - RNA, 20 nt, synthetic construct
  misc_feature 1..20: note = spacer sequence
  source 1..20: mol_type = other RNA
cgctctgtcgcccaggctgg

SEQ ID NO: 6138 - RNA, 20 nt, synthetic construct
  misc_feature 1..20: note = spacer sequence
  source 1..20: mol_type = other RNA
tctcaaaaaaaaaaagaaaa

SEQ ID NO: 6139 - RNA, 20 nt, synthetic construct
  misc_feature 1..20: note = spacer sequence
  source 1..20: mol_type = other RNA
caaaaaaaaaaagaaaaaaa

SEQ ID NO: 6140 - RNA, 20 nt, synthetic construct
  misc_feature 1..20: note = spacer sequence
  source 1..20: mol_type = other RNA
aaaaaaaaaagaaaaaaact

SEQ ID NO: 6141 - RNA, 20 nt, synthetic construct
  misc_feature 1..20: note = spacer sequence
  source 1..20: mol_type = other RNA
ttttttttttgagacgagtc

SEQ ID NO: 6142 - RNA, 20 nt, synthetic construct
  misc_feature 1..20: note = spacer sequence
  source 1..20: mol_type = other RNA
taagtttttttctttttttt

SEQ ID NO: 6143 - RNA, 20 nt, synthetic construct
  misc_feature 1..20: note = spacer sequence
  source 1..20: mol_type = other RNA
atcataagtttttttctttt

SEQ ID NO: 6144 - RNA, 20 nt, synthetic construct
  misc_feature 1..20: note = spacer sequence
  source 1..20: mol_type = other RNA
ctgagtggggagtggagagc

SEQ ID NO: 6145 - RNA, 20 nt, synthetic construct
  misc_feature 1..20: note = spacer sequence
  source 1..20: mol_type = other RNA
gtgagtgtttttaagtgtcc

SEQ ID NO: 6146 - RNA, 20 nt, synthetic construct
  misc_feature 1..20: note = spacer sequence
  source 1..20: mol_type = other RNA
ccactcagtgagtgttttta

SEQ ID NO: 6147 - RNA, 20 nt, synthetic construct
  misc_feature 1..20: note = spacer sequence
  source 1..20: mol_type = other RNA
actccccactcagtgagtgt

SEQ ID NO: 6148 - RNA, 20 nt, synthetic construct
  misc_feature 1..20: note = spacer sequence
  source 1..20: mol_type = other RNA
ccactccccactcagtgagt

SEQ ID NO: 6149 - RNA, 20 nt, synthetic construct
  misc_feature 1..20: note = spacer sequence
  source 1..20: mol_type = other RNA
cagggtagcctgttggacat

SEQ ID NO: 6150 - RNA, 20 nt, synthetic construct
  misc_feature 1..20: note = spacer sequence
  source 1..20: mol_type = other RNA
aacaggctaccctgggaccc

SEQ ID NO: 6151 - RNA, 20 nt, synthetic construct
  misc_feature 1..20: note = spacer sequence
  source 1..20: mol_type = other RNA
agggcgactttttctttttt

SEQ ID NO: 6152 - RNA, 20 nt, synthetic construct
  misc_feature 1..20: note = spacer sequence
  source 1..20: mol_type = other RNA
ccctggaaatgtccaacagg

SEQ ID NO: 6153 - RNA, 20 nt, synthetic construct
  misc_feature 1..20: note = spacer sequence
  source 1..20: mol_type = other RNA
ttttttttttttaaagtcaa

SEQ ID NO: 6154 - RNA, 20 nt, synthetic construct
  misc_feature 1..20: note = spacer sequence
  source 1..20: mol_type = other RNA
agtgagtatgccatatggaa

SEQ ID NO: 6155 - RNA, 20 nt, synthetic construct
  misc_feature 1..20: note = spacer sequence
  source 1..20: mol_type = other RNA
cttgactttaaaaaaaaaaa

SEQ ID NO: 6156 - RNA, 20 nt, synthetic construct
  misc_feature 1..20: note = spacer sequence
  source 1..20: mol_type = other RNA
atatggcatactcacttgac

SEQ ID NO: 6157 - RNA, 20 nt, synthetic construct
  misc_feature 1..20: note = spacer sequence
  source 1..20: mol_type = other RNA
acgcacacccttttccatat

SEQ ID NO: 6158 - RNA, 20 nt, synthetic construct
  misc_feature 1..20: note = spacer sequence
  source 1..20: mol_type = other RNA
ccacgcacacccttttccat

SEQ ID NO: 6159 - RNA, 20 nt, synthetic construct
  misc_feature 1..20: note = spacer sequence
  source 1..20: mol_type = other RNA
agagtgtaggatgagacata

SEQ ID NO: 6160 - RNA, 20 nt, synthetic construct
  misc_feature 1..20: note = spacer sequence
  source 1..20: mol_type = other RNA
ggagccccttgctttttctc

SEQ ID NO: 6161 - RNA, 20 nt, synthetic construct
  misc_feature 1..20: note = spacer sequence
  source 1..20: mol_type = other RNA
tacactctggagccccttgc

SEQ ID NO: 6162 - RNA, 20 nt, synthetic construct
  misc_feature 1..20: note = spacer sequence
  source 1..20: mol_type = other RNA
tcctacactctggagcccct

SEQ ID NO: 6163 - RNA, 20 nt, synthetic construct
  misc_feature 1..20: note = spacer sequence
  source 1..20: mol_type = other RNA
catcctacactctggagccc

SEQ ID NO: 6164 - RNA, 20 nt, synthetic construct
  misc_feature 1..20: note = spacer sequence
  source 1..20: mol_type = other RNA
gcctttttaacccaaaaggt

SEQ ID NO: 6165 - RNA, 20 nt, synthetic construct
  misc_feature 1..20: note = spacer sequence
  source 1..20: mol_type = other RNA
tgcctcagcctttttaaccc

SEQ ID NO: 6166 - RNA, 20 nt, synthetic construct
  misc_feature 1..20: note = spacer sequence
  source 1..20: mol_type = other RNA
cctgcctcagcctttttaac

SEQ ID NO: 6167 - RNA, 20 nt, synthetic construct
  misc_feature 1..20: note = spacer sequence
  source 1..20: mol_type = other RNA
cgccattctcctgcctcagc

SEQ ID NO: 6168 - RNA, 20 nt, synthetic construct
  misc_feature 1..20: note = spacer sequence
  source 1..20: mol_type = other RNA
cgggttcacgccattctcct

SEQ ID NO: 6169 - RNA, 20 nt, synthetic construct
  misc_feature 1..20: note = spacer sequence
  source 1..20: mol_type = other RNA
gcctcccgggttcacgccat

SEQ ID NO: 6170 - RNA, 20 nt, synthetic construct
  misc_feature 1..20: note = spacer sequence
  source 1..20: mol_type = other RNA
ctgcaagctccgcctcccgg

SEQ ID NO: 6171 - RNA, 20 nt, synthetic construct
  misc_feature 1..20: note = spacer sequence
  source 1..20: mol_type = other RNA
gctcactgcaagctccgcct

SEQ ID NO: 6172 - RNA, 20 nt, synthetic construct
  misc_feature 1..20: note = spacer sequence
  source 1..20: mol_type = other RNA
cagctcactgcaagctccgc

SEQ ID NO: 6173 - RNA, 20 nt, synthetic construct
  misc_feature 1..20: note = spacer sequence
  source 1..20: mol_type = other RNA
tgccactgcactccagcctg

SEQ ID NO: 6174 - RNA, 20 nt, synthetic construct
  misc_feature 1..20: note = spacer sequence
  source 1..20: mol_type = other RNA
agcctgggcgacagagcgag

SEQ ID NO: 6175 - RNA, 20 nt, synthetic construct
  misc_feature 1..20: note = spacer sequence
  source 1..20: mol_type = other RNA
cccaggctggagtgcagtgg

SEQ ID NO: 6176 - RNA, 20 nt, synthetic construct
  misc_feature 1..20: note = spacer sequence
  source 1..20: mol_type = other RNA
gtcgcccaggctggagtgca

SEQ ID NO: 6177 - RNA, 20 nt, synthetic construct
  misc_feature 1..20: note = spacer sequence
  source 1..20: mol_type = other RNA
ctctgtcgcccaggctggag

SEQ ID NO: 6178 - RNA, 20 nt, synthetic construct
  misc_feature 1..20: note = spacer sequence
  source 1..20: mol_type = other RNA
cgctctgtcgcccaggctgg

SEQ ID NO: 6179 - RNA, 20 nt, synthetic construct
  misc_feature 1..20: note = spacer sequence
  source 1..20: mol_type = other RNA
tgtctcaaaataaaaaacgt

SEQ ID NO: 6180 - RNA, 20 nt, synthetic construct
  misc_feature 1..20: note = spacer sequence
  source 1..20: mol_type = other RNA
caaaataaaaaacgtttaca

SEQ ID NO: 6181 - RNA, 20 nt, synthetic construct
  misc_feature 1..20: note = spacer sequence
  source 1..20: mol_type = other RNA
aaataaaaaacgtttacatg

SEQ ID NO: 6182 - RNA, 20 nt, synthetic construct
  misc_feature 1..20: note = spacer sequence
  source 1..20: mol_type = other RNA
acatgtacaaatataaccta

SEQ ID NO: 6183 - RNA, 20 nt, synthetic construct
  misc_feature 1..20: note = spacer sequence
  source 1..20: mol_type = other RNA
aaagtatttactacataaat

SEQ ID NO: 6184 - RNA, 20 nt, synthetic construct
  misc_feature 1..20: note = spacer sequence
  source 1..20: mol_type = other RNA
aagcctatgaagtatctaac

SEQ ID NO: 6185 - RNA, 20 nt, synthetic construct
  misc_feature 1..20: note = spacer sequence
  source 1..20: mol_type = other RNA
taggctttgactattacagt

SEQ ID NO: 6186 - RNA, 20 nt, synthetic construct
  misc_feature 1..20: note = spacer sequence
  source 1..20: mol_type = other RNA
aacactgatgtgtaggtact

SEQ ID NO: 6187 - RNA, 20 nt, synthetic construct
  misc_feature 1..20: note = spacer sequence
  source 1..20: mol_type = other RNA
gtgttagatacttcataggc

SEQ ID NO: 6188 - RNA, 20 nt, synthetic construct
  misc_feature 1..20: note = spacer sequence
  source 1..20: mol_type = other RNA
ctttgcttgccactctatta

SEQ ID NO: 6189 - RNA, 20 nt, synthetic construct
  misc_feature 1..20: note = spacer sequence
  source 1..20: mol_type = other RNA
attaggtgctttttatgtta

SEQ ID NO: 6190 - RNA, 20 nt, synthetic construct
  misc_feature 1..20: note = spacer sequence
  source 1..20: mol_type = other RNA
tgaagcctggccacagggtg

SEQ ID NO: 6191 - RNA, 20 nt, synthetic construct
  misc_feature 1..20: note = spacer sequence
  source 1..20: mol_type = other RNA
tgattaaataacataaaaag

SEQ ID NO: 6192 - RNA, 20 nt, synthetic construct
  misc_feature 1..20: note = spacer sequence
  source 1..20: mol_type = other RNA
atgcacaagcaccctgtggc

SEQ ID NO: 6193 - RNA, 20 nt, synthetic construct
  misc_feature 1..20: note = spacer sequence
  source 1..20: mol_type = other RNA
cacactcaatgcacaagcac

SEQ ID NO: 6194 - RNA, 20 nt, synthetic construct
  misc_feature 1..20: note = spacer sequence
  source 1..20: mol_type = other RNA
tgttcccacactcaatgcac

SEQ ID NO: 6195 - RNA, 20 nt, synthetic construct
  misc_feature 1..20: note = spacer sequence
  source 1..20: mol_type = other RNA
cccttttgaggacacaggcc

SEQ ID NO: 6196 - RNA, 20 nt, synthetic construct
  misc_feature 1..20: note = spacer sequence
  source 1..20: mol_type = other RNA
cttttgaggacacaggccta

SEQ ID NO: 6197 - RNA, 20 nt, synthetic construct
  misc_feature 1..20: note = spacer sequence
  source 1..20: mol_type = other RNA
aaagggagatggtaatcttg

SEQ ID NO: 6198 - RNA, 20 nt, synthetic construct
  misc_feature 1..20: note = spacer sequence
  source 1..20: mol_type = other RNA
tcaaaagggagatggtaatc

SEQ ID NO: 6199 - RNA, 20 nt, synthetic construct
  misc_feature 1..20: note = spacer sequence
  source 1..20: mol_type = other RNA
aggcctgtgtcctcaaaagg

SEQ ID NO: 6200 - RNA, 20 nt, synthetic construct
  misc_feature 1..20: note = spacer sequence
  source 1..20: mol_type = other RNA
agcaagctgcttaactgctc

SEQ ID NO: 6201 - RNA, 20 nt, synthetic construct
  misc_feature 1..20: note = spacer sequence
  source 1..20: mol_type = other RNA
ctggctagaaagtggtcagc

SEQ ID NO: 6202 - RNA, 20 nt, synthetic construct
  misc_feature 1..20: note = spacer sequence
  source 1..20: mol_type = other RNA
agccagtgaacctccagcaa

SEQ ID NO: 6203 - RNA, 20 nt, synthetic construct
  misc_feature 1..20: note = spacer sequence
  source 1..20: mol_type = other RNA
gcctgggatttggacacaga

SEQ ID NO: 6204 - RNA, 20 nt, synthetic construct
  misc_feature 1..20: note = spacer sequence
  source 1..20: mol_type = other RNA
caggctgaccactttctagc

SEQ ID NO: 6205 - RNA, 20 nt, synthetic construct
  misc_feature 1..20: note = spacer sequence
  source 1..20: mol_type = other RNA
aaatcccaggctgaccactt

SEQ ID NO: 6206 - RNA, 20 nt, synthetic construct
  misc_feature 1..20: note = spacer sequence
  source 1..20: mol_type = other RNA
gtgtccaaatcccaggctga

SEQ ID NO: 6207 - RNA, 20 nt, synthetic construct
  misc_feature 1..20: note = spacer sequence
  source 1..20: mol_type = other RNA
actcccaagtctggctgctt

SEQ ID NO: 6208 - RNA, 20 nt, synthetic construct
  misc_feature 1..20: note = spacer sequence
  source 1..20: mol_type = other RNA
caagtctggctgctttttac

SEQ ID NO: 6209 - RNA, 20 nt, synthetic construct
  misc_feature 1..20: note = spacer sequence
  source 1..20: mol_type = other RNA
ggctgctttttacttcactg

SEQ ID NO: 6210 - RNA, 20 nt, synthetic construct
  misc_feature 1..20: note = spacer sequence
  source 1..20: mol_type = other RNA
ctgtgaggggtaaaggtaaa

SEQ ID NO: 6211 - RNA, 20 nt, synthetic construct
  misc_feature 1..20: note = spacer sequence
  source 1..20: mol_type = other RNA
cagtgaagtaaaaagcagcc

SEQ ID NO: 6212 - RNA, 20 nt, synthetic construct
  misc_feature 1..20: note = spacer sequence
  source 1..20: mol_type = other RNA
gctgttttctttgttcagaa

SEQ ID NO: 6213 - RNA, 20 nt, synthetic construct
  misc_feature 1..20: note = spacer sequence
  source 1..20: mol_type = other RNA
ttgttcagaaactctctcca

SEQ ID NO: 6214 - RNA, 20 nt, synthetic construct
  misc_feature 1..20: note = spacer sequence
  source 1..20: mol_type = other RNA
gaaactctctccaactttgc

SEQ ID NO: 6215 - RNA, 20 nt, synthetic construct
  misc_feature 1..20: note = spacer sequence
  source 1..20: mol_type = other RNA
gaacaaagaaaacagctgat

SEQ ID NO: 6216 - RNA, 20 nt, synthetic construct
  misc_feature 1..20: note = spacer sequence
  source 1..20: mol_type = other RNA
ctccaactttgcacttttct

SEQ ID NO: 6217 - RNA, 20 nt, synthetic construct
  misc_feature 1..20: note = spacer sequence
  source 1..20: mol_type = other RNA
ccaactttgcacttttctta

SEQ ID NO: 6218 - RNA, 20 nt, synthetic construct
  misc_feature 1..20: note = spacer sequence
  source 1..20: mol_type = other RNA
aactttgcacttttcttaaa

SEQ ID NO: 6219 - RNA, 20 nt, synthetic construct
  misc_feature 1..20: note = spacer sequence
  source 1..20: mol_type = other RNA
taaaggaaagtaatggacca

SEQ ID NO: 6220 - RNA, 20 nt, synthetic construct
  misc_feature 1..20: note = spacer sequence
  source 1..20: mol_type = other RNA
tttaagaaaagtgcaaagtt

SEQ ID NO: 6221 - RNA, 20 nt, synthetic construct
  misc_feature 1..20: note = spacer sequence
  source 1..20: mol_type = other RNA
attactttcctttaagaaaa

SEQ ID NO: 6222 - RNA, 20 nt, synthetic construct
  misc_feature 1..20: note = spacer sequence
  source 1..20: mol_type = other RNA
ctggtccattactttccttt

SEQ ID NO: 6223 - RNA, 20 nt, synthetic construct
  misc_feature 1..20: note = spacer sequence
  source 1..20: mol_type = other RNA
ccacaccttcactggtccat

SEQ ID NO: 6224 - RNA, 20 nt, synthetic construct
  misc_feature 1..20: note = spacer sequence
  source 1..20: mol_type = other RNA
tttaatgcttccccacacct

SEQ ID NO: 6225 - RNA, 20 nt, synthetic construct
  misc_feature 1..20: note = spacer sequence
  source 1..20: mol_type = other RNA
gtcctttaatgcttccccac

SEQ ID NO: 6226 - RNA, 20 nt, synthetic construct
  misc_feature 1..20: note = spacer sequence
  source 1..20: mol_type = other RNA
gtcagtcctttaatgcttcc

SEQ ID NO: 6227 - RNA, 20 nt, synthetic construct
  misc_feature 1..20: note = spacer sequence
  source 1..20: mol_type = other RNA
atgcaggccttcagtcagtc

SEQ ID NO: 6228 - RNA, 20 nt, synthetic construct
  misc_feature 1..20: note = spacer sequence
  source 1..20: mol_type = other RNA
atgttcatgagtttggagat

SEQ ID NO: 6229 - RNA, 20 nt, synthetic construct
  misc_feature 1..20: note = spacer sequence
  source 1..20: mol_type = other RNA
tgagtttggagataatacag

SEQ ID NO: 6230 - RNA, 20 nt, synthetic construct
  misc_feature 1..20: note = spacer sequence
  source 1..20: mol_type = other RNA
tgaacatggaatccatgcag

SEQ ID NO: 6231 - RNA, 20 nt, synthetic construct
  misc_feature 1..20: note = spacer sequence
  source 1..20: mol_type = other RNA
aaactcatgaacatggaatc

SEQ ID NO: 6232 - RNA, 20 nt, synthetic construct
  misc_feature 1..20: note = spacer sequence
  source 1..20: mol_type = other RNA
ccaaactcatgaacatggaa

SEQ ID NO: 6233 - RNA, 20 nt, synthetic construct
  misc_feature 1..20: note = spacer sequence
  source 1..20: mol_type = other RNA
ccagcacagcacaacaccca

SEQ ID NO: 6234 - RNA, 20 nt, synthetic construct
  misc_feature 1..20: note = spacer sequence
  source 1..20: mol_type = other RNA
ccctagttagataaacagta

SEQ ID NO: 6235 - RNA, 20 nt, synthetic construct
  misc_feature 1..20: note = spacer sequence
  source 1..20: mol_type = other RNA
aactagggtgaacaagtatg

SEQ ID NO: 6236 - RNA, 20 nt, synthetic construct
  misc_feature 1..20: note = spacer sequence
  source 1..20: mol_type = other RNA
actgtttatctaactagggt

SEQ ID NO: 6237 - RNA, 20 nt, synthetic construct
  misc_feature 1..20: note = spacer sequence
  source 1..20: mol_type = other RNA
acttgtttttgtttttgaga

SEQ ID NO: 6238 - RNA, 20 nt, synthetic construct
  misc_feature 1..20: note = spacer sequence
  source 1..20: mol_type = other RNA
aaaacaaaaacaagttgagg

SEQ ID NO: 6239 - RNA, 20 nt, synthetic construct
  misc_feature 1..20: note = spacer sequence
  source 1..20: mol_type = other RNA
caaaaacaaaaacaagttga

SEQ ID NO: 6240 - RNA, 20 nt, synthetic construct
  misc_feature 1..20: note = spacer sequence
  source 1..20: mol_type = other RNA
tgctctgtcgctcaggctgg

SEQ ID NO: 6241 - RNA, 20 nt, synthetic construct
  misc_feature 1..20: note = spacer sequence
  source 1..20: mol_type = other RNA
gtcgctcaggctggagtgca

SEQ ID NO: 6242 - RNA, 20 nt, synthetic construct
  misc_feature 1..20: note = spacer sequence
  source 1..20: mol_type = other RNA
ctcaggctggagtgcagtgg

SEQ ID NO: 6243 - RNA, 20 nt, synthetic construct
  misc_feature 1..20: note = spacer sequence
  source 1..20: mol_type = other RNA
ggctggagtgcagtggcgct

SEQ ID NO: 6244 - RNA, 20 nt, synthetic construct
  misc_feature 1..20: note = spacer sequence
  source 1..20: mol_type = other RNA
agcctgagcgacagagcaag

SEQ ID NO: 6245 - RNA, 20 nt, synthetic construct
  misc_feature 1..20: note = spacer sequence
  source 1..20: mol_type = other RNA
cacagcgccactgcactcca

SEQ ID NO: 6246 - RNA, 20 nt, synthetic construct
  misc_feature 1..20: note = spacer sequence
  source 1..20: mol_type = other RNA
tggctgaccttagccttgac

SEQ ID NO: 6247 - RNA, 20 nt, synthetic construct
  misc_feature 1..20: note = spacer sequence
  source 1..20: mol_type = other RNA
gccatgatcgcacagcgcca

SEQ ID NO: 6248 - RNA, 20 nt, synthetic construct
  misc_feature 1..20: note = spacer sequence
  source 1..20: mol_type = other RNA
aggctaaggtcagccatgat

SEQ ID NO: 6249 - RNA, 20 nt, synthetic construct
  misc_feature 1..20: note = spacer sequence
  source 1..20: mol_type = other RNA
caggctccattgatcctcat

SEQ ID NO: 6250 - RNA, 20 nt, synthetic construct
  misc_feature 1..20: note = spacer sequence
  source 1..20: mol_type = other RNA
attgatcctcatgccttggc

SEQ ID NO: 6251 - RNA, 20 nt, synthetic construct
  misc_feature 1..20: note = spacer sequence
  source 1..20: mol_type = other RNA
atggagcctgggaggtcaag

SEQ ID NO: 6252 - RNA, 20 nt, synthetic construct
  misc_feature 1..20: note = spacer sequence
  source 1..20: mol_type = other RNA
tcatgccttggcccgtagct

SEQ ID NO: 6253 - RNA, 20 nt, synthetic construct
  misc_feature 1..20: note = spacer sequence
  source 1..20: mol_type = other RNA
tgccttggcccgtagctggg

SEQ ID NO: 6254 - RNA, 20 nt, synthetic construct
  misc_feature 1..20: note = spacer sequence
  source 1..20: mol_type = other RNA
cagctacgggccaaggcatg

SEQ ID NO: 6255 - RNA, 20 nt, synthetic construct
  misc_feature 1..20: note = spacer sequence
  source 1..20: mol_type = other RNA
agaggtggggtttcatcatg

SEQ ID NO: 6256 - RNA, 20 nt, synthetic construct
  misc_feature 1..20: note = spacer sequence
  source 1..20: mol_type = other RNA
agaaaaaaatacaaaaatta

SEQ ID NO: 6257 - RNA, 20 nt, synthetic construct
  misc_feature 1..20: note = spacer sequence
  source 1..20: mol_type = other RNA
tcatgttgcccaggctggtc

SEQ ID NO: 6258 - RNA, 20 nt, synthetic construct
  misc_feature 1..20: note = spacer sequence
  source 1..20: mol_type = other RNA
tgttgcccaggctggtcttg

SEQ ID NO: 6259 - RNA, 20 nt, synthetic construct
  misc_feature 1..20: note = spacer sequence
  source 1..20: mol_type = other RNA
tgaactgctgggctcaagtg

SEQ ID NO: 6260 - RNA, 20 nt, synthetic construct
  misc_feature 1..20: note = spacer sequence
  source 1..20: mol_type = other RNA
agaccagcctgggcaacatg

SEQ ID NO: 6261 - RNA, 20 nt, synthetic construct
  misc_feature 1..20: note = spacer sequence
  source 1..20: mol_type = other RNA
agtggtctatcctcctcgac

SEQ ID NO: 6262 - RNA, 20 nt, synthetic construct
  misc_feature 1..20: note = spacer sequence
  source 1..20: mol_type = other RNA
atcctcctcgacctcccaaa

SEQ ID NO: 6263 - RNA, 20 nt, synthetic construct
  misc_feature 1..20: note = spacer sequence
  source 1..20: mol_type = other RNA
tcctcgacctcccaaagtgc

SEQ ID NO: 6264 - RNA, 20 nt, synthetic construct
  misc_feature 1..20: note = spacer sequence
  source 1..20: mol_type = other RNA
tcgacctcccaaagtgctgg

SEQ ID NO: 6265 - RNA, 20 nt, synthetic construct
  misc_feature 1..20: note = spacer sequence
  source 1..20: mol_type = other RNA
acctcccaaagtgctgggat

SEQ ID NO: 6266 - RNA, 20 nt, synthetic construct
  misc_feature 1..20: note = spacer sequence
  source 1..20: mol_type = other RNA
aggaggatagaccacttgag

SEQ ID NO: 6267 - RNA, 20 nt, synthetic construct
  misc_feature 1..20: note = spacer sequence
  source 1..20: mol_type = other RNA
caaagtgctgggattacatg

SEQ ID NO: 6268 - RNA, 20 nt, synthetic construct
  misc_feature 1..20: note = spacer sequence
  source 1..20: mol_type = other RNA
cagcactttgggaggtcgag

SEQ ID NO: 6269 - RNA, 20 nt, synthetic construct
  misc_feature 1..20: note = spacer sequence
  source 1..20: mol_type = other RNA
cacatgtaatcccagcactt

SEQ ID NO: 6270 - RNA, 20 nt, synthetic construct
  misc_feature 1..20: note = spacer sequence
  source 1..20: mol_type = other RNA
caggcacagtggctcacaca

SEQ ID NO: 6271 - RNA, 20 nt, synthetic construct
  misc_feature 1..20: note = spacer sequence
  source 1..20: mol_type = other RNA
acttttcttttaaaaaagag

SEQ ID NO: 6272 - RNA, 20 nt, synthetic construct
  misc_feature 1..20: note = spacer sequence
  source 1..20: mol_type = other RNA
tttaaaaaagaggtcaactt

SEQ ID NO: 6273 - RNA, 20 nt, synthetic construct
  misc_feature 1..20: note = spacer sequence
  source 1..20: mol_type = other RNA
tttttaaaagaaaagttgag

SEQ ID NO: 6274 - RNA, 20 nt, synthetic construct
  misc_feature 1..20: note = spacer sequence
  source 1..20: mol_type = other RNA
actttattgtatataagcac

SEQ ID NO: 6275 - RNA, 20 nt, synthetic construct
  misc_feature 1..20: note = spacer sequence
  source 1..20: mol_type = other RNA
tgcaattttagcacagtgct

SEQ ID NO: 6276 - RNA, 20 nt, synthetic construct
  misc_feature 1..20: note = spacer sequence
  source 1..20: mol_type = other RNA
cagttcctgcaattttagca

SEQ ID NO: 6277 - RNA, 20 nt, synthetic construct
  misc_feature 1..20: note = spacer sequence
  source 1..20: mol_type = other RNA
tgatttttgtaataatgcca

SEQ ID NO: 6278 - RNA, 20 nt, synthetic construct
  misc_feature 1..20: note = spacer sequence
  source 1..20: mol_type = other RNA
ggatatggtcccagttcctg

SEQ ID NO: 6279 - RNA, 20 nt, synthetic construct
  misc_feature 1..20: note = spacer sequence
  source 1..20: mol_type = other RNA
gctggcattattacaaaaat

SEQ ID NO: 6280 - RNA, 20 nt, synthetic construct
  misc_feature 1..20: note = spacer sequence
  source 1..20: mol_type = other RNA
tgtgtgtactctgctggcat

SEQ ID NO: 6281 - RNA, 20 nt, synthetic construct
  misc_feature 1..20: note = spacer sequence
  source 1..20: mol_type = other RNA
agtgcagttacttttcttgt

SEQ ID NO: 6282 - RNA, 20 nt, synthetic construct
  misc_feature 1..20: note = spacer sequence
  source 1..20: mol_type = other RNA
caatctagtgcagttacttt

SEQ ID NO: 6283 - RNA, 20 nt, synthetic construct
  misc_feature 1..20: note = spacer sequence
  source 1..20: mol_type = other RNA
tcacaatctagtgcagttac

SEQ ID NO: 6284 - RNA, 20 nt, synthetic construct
  misc_feature 1..20: note = spacer sequence
  source 1..20: mol_type = other RNA
accccagtcttcacaatcta

SEQ ID NO: 6285 - RNA, 20 nt, synthetic construct
  misc_feature 1..20: note = spacer sequence
  source 1..20: mol_type = other RNA
gaaggtccagtgccctttgt

SEQ ID NO: 6286 - RNA, 20 nt, synthetic construct
  misc_feature 1..20: note = spacer sequence
  source 1..20: mol_type = other RNA
gaagcaggtccaccccagtc

SEQ ID NO: 6287 - RNA, 20 nt, synthetic construct
  misc_feature 1..20: note = spacer sequence
  source 1..20: mol_type = other RNA
agtgccctttgtcttaagat

SEQ ID NO: 6288 - RNA, 20 nt, synthetic construct
  misc_feature 1..20: note = spacer sequence
  source 1..20: mol_type = other RNA
taagatttggtgtagtgtgt

SEQ ID NO: 6289 - RNA, 20 nt, synthetic construct
  misc_feature 1..20: note = spacer sequence
  source 1..20: mol_type = other RNA
taagacaaagggcactggac

SEQ ID NO: 6290 - RNA, 20 nt, synthetic construct
  misc_feature 1..20: note = spacer sequence
  source 1..20: mol_type = other RNA
ttagaaaccaaaaaaagaga

SEQ ID NO: 6291 - RNA, 20 nt, synthetic construct
  misc_feature 1..20: note = spacer sequence
  source 1..20: mol_type = other RNA
aaagacacactacaccaaat

SEQ ID NO: 6292 - RNA, 20 nt, synthetic construct
  misc_feature 1..20: note = spacer sequence
  source 1..20: mol_type = other RNA
ttttttggtttctaaagaca

SEQ ID NO: 6293 - RNA, 20 nt, synthetic construct
  misc_feature 1..20: note = spacer sequence
  source 1..20: mol_type = other RNA
ctttttttggtttctaaaga

SEQ ID NO: 6294 - RNA, 20 nt, synthetic construct
  misc_feature 1..20: note = spacer sequence
  source 1..20: mol_type = other RNA
tctctttttttggtttctaa

SEQ ID NO: 6295 - RNA, 20 nt, synthetic construct
  misc_feature 1..20: note = spacer sequence
  source 1..20: mol_type = other RNA
tcttctctttttttggtttc

SEQ ID NO: 6296 - RNA, 20 nt, synthetic construct
  misc_feature 1..20: note = spacer sequence
  source 1..20: mol_type = other RNA
accttaagattagccacaaa

SEQ ID NO: 6297 - RNA, 20 nt, synthetic construct
  misc_feature 1..20: note = spacer sequence
  source 1..20: mol_type = other RNA
taaggttgatcttcttctct

SEQ ID NO: 6298 - RNA, 20 nt, synthetic construct
  misc_feature 1..20: note = spacer sequence
  source 1..20: mol_type = other RNA
aagcccagttttgtggctaa

SEQ ID NO: 6299 - RNA, 20 nt, synthetic construct
  misc_feature 1..20: note = spacer sequence
  source 1..20: mol_type = other RNA
acacctaggtatcaaagccc

SEQ ID NO: 6300 - RNA, 20 nt, synthetic construct
  misc_feature 1..20: note = spacer sequence
  source 1..20: mol_type = other RNA
tttccacacctaggtatcaa

SEQ ID NO: 6301 - RNA, 20 nt, synthetic construct
  misc_feature 1..20: note = spacer sequence
  source 1..20: mol_type = other RNA
ctttcttttccacacctagg

SEQ ID NO: 6302 - RNA, 20 nt, synthetic construct
  misc_feature 1..20: note = spacer sequence
  source 1..20: mol_type = other RNA
ttccctttcttttccacacc

SEQ ID NO: 6303 - RNA, 20 nt, synthetic construct
  misc_feature 1..20: note = spacer sequence
  source 1..20: mol_type = other RNA
actctttccctttcttttcc

SEQ ID NO: 6304 - RNA, 20 nt, synthetic construct
  misc_feature 1..20: note = spacer sequence
  source 1..20: mol_type = other RNA
tacagcatcattgtagaaga

SEQ ID NO: 6305 - RNA, 20 nt, synthetic construct
  misc_feature 1..20: note = spacer sequence
  source 1..20: mol_type = other RNA
ttgtagaagagggtgttttt

SEQ ID NO: 6306 - RNA, 20 nt, synthetic construct
  misc_feature 1..20: note = spacer sequence
  source 1..20: mol_type = other RNA
acaatgatgctgtaagacaa

SEQ ID NO: 6307 - RNA, 20 nt, synthetic construct
  misc_feature 1..20: note = spacer sequence
  source 1..20: mol_type = other RNA
tctacaatgatgctgtaaga

SEQ ID NO: 6308 - RNA, 20 nt, synthetic construct
  misc_feature 1..20: note = spacer sequence
  source 1..20: mol_type = other RNA
aaaaacaaacaaacaaaaaa

SEQ ID NO: 6309 - RNA, 20 nt, synthetic construct
  misc_feature 1..20: note = spacer sequence
  source 1..20: mol_type = other RNA
caaaaaacaaacaaacaaaa

SEQ ID NO: 6310 - RNA, 20 nt, synthetic construct
  misc_feature 1..20: note = spacer sequence
  source 1..20: mol_type = other RNA
gtctcaaaaaacaaacaaac

SEQ ID NO: 6311 - RNA, 20 nt, synthetic construct
  misc_feature 1..20: note = spacer sequence
  source 1..20: mol_type = other RNA
tactctgtggcccaggctgg

SEQ ID NO: 6312 - RNA, 20 nt, synthetic construct
  misc_feature 1..20: note = spacer sequence
  source 1..20: mol_type = other RNA
gtggcccaggctggagtgca

SEQ ID NO: 6313 - RNA, 20 nt, synthetic construct
  misc_feature 1..20: note = spacer sequence
  source 1..20: mol_type = other RNA
agcctgggccacagagtaag

SEQ ID NO: 6314 - RNA, 20 nt, synthetic construct
  misc_feature 1..20: note = spacer sequence
  source 1..20: mol_type = other RNA
cgccactgcactccagcctg

SEQ ID NO: 6315 - RNA, 20 nt, synthetic construct
  misc_feature 1..20: note = spacer sequence
  source 1..20: mol_type = other RNA
cggctcactgcaagctccgc

SEQ ID NO: 6316 - RNA, 20 nt, synthetic construct
  misc_feature 1..20: note = spacer sequence
  source 1..20: mol_type = other RNA
gctcactgcaagctccgcct

SEQ ID NO: 6317 - RNA, 20 nt, synthetic construct
  misc_feature 1..20: note = spacer sequence
  source 1..20: mol_type = other RNA
ctgcaagctccgcctcccgg

SEQ ID NO: 6318 - RNA, 20 nt, synthetic construct
  misc_feature 1..20: note = spacer sequence
  source 1..20: mol_type = other RNA
gcctcccgggttcatgccat

SEQ ID NO: 6319 - RNA, 20 nt, synthetic construct
  misc_feature 1..20: note = spacer sequence
  source 1..20: mol_type = other RNA
cgggttcatgccattctcct

SEQ ID NO: 6320 - RNA, 20 nt, synthetic construct
  misc_feature 1..20: note = spacer sequence
  source 1..20: mol_type = other RNA
tgccattctcctgcctcagc

SEQ ID NO: 6321 - RNA, 20 nt, synthetic construct
  misc_feature 1..20: note = spacer sequence
  source 1..20: mol_type = other RNA
cctgcctcagccccctgagt

SEQ ID NO: 6322 - RNA, 20 nt, synthetic construct
  misc_feature 1..20: note = spacer sequence
  source 1..20: mol_type = other RNA
tgcctcagccccctgagtag

SEQ ID NO: 6323 - RNA, 20 nt, synthetic construct
  misc_feature 1..20: note = spacer sequence
  source 1..20: mol_type = other RNA
gccccctgagtagctgggac

SEQ ID NO: 6324 - RNA, 20 nt, synthetic construct
  misc_feature 1..20: note = spacer sequence
  source 1..20: mol_type = other RNA
gggggctgaggcaggagaat

SEQ ID NO: 6325 - RNA, 20 nt, synthetic construct
  misc_feature 1..20: note = spacer sequence
  source 1..20: mol_type = other RNA
cagctactcagggggctgag

SEQ ID NO: 6326 - RNA, 20 nt, synthetic construct
  misc_feature 1..20: note = spacer sequence
  source 1..20: mol_type = other RNA
actaaaaatacaaaaaatta

SEQ ID NO: 6327 - RNA, 20 nt, synthetic construct
  misc_feature 1..20: note = spacer sequence
  source 1..20: mol_type = other RNA
ctactaaaaatacaaaaaat

SEQ ID NO: 6328 - RNA, 20 nt, synthetic construct
  misc_feature 1..20: note = spacer sequence
  source 1..20: mol_type = other RNA
ctgtgttagccaagatggtc

SEQ ID NO: 6329 - RNA, 20 nt, synthetic construct
  misc_feature 1..20: note = spacer sequence
  source 1..20: mol_type = other RNA
tggctaacacagtgaaaccc

SEQ ID NO: 6330 - RNA, 20 nt, synthetic construct
  misc_feature 1..20: note = spacer sequence
  source 1..20: mol_type = other RNA
ctctcctgacctcgtgatcc

SEQ ID NO: 6331 - RNA, 20 nt, synthetic construct
  misc_feature 1..20: note = spacer sequence
  source 1..20: mol_type = other RNA
ctcctgacctcgtgatccgc

SEQ ID NO: 6332 - RNA, 20 nt, synthetic construct
  misc_feature 1..20: note = spacer sequence
  source 1..20: mol_type = other RNA
cctgacctcgtgatccgcct

SEQ ID NO: 6333 - RNA, 20 nt, synthetic construct
  misc_feature 1..20: note = spacer sequence
  source 1..20: mol_type = other RNA
tgacctcgtgatccgcctgt

SEQ ID NO: 6334 - RNA, 20 nt, synthetic construct
  misc_feature 1..20: note = spacer sequence
  source 1..20: mol_type = other RNA
ggagagagaccatcttggct

SEQ ID NO: 6335 - RNA, 20 nt, synthetic construct
  misc_feature 1..20: note = spacer sequence
  source 1..20: mol_type = other RNA
tgatccgcctgtctcagcct

SEQ ID NO: 6336 - RNA, 20 nt, synthetic construct
  misc_feature 1..20: note = spacer sequence
  source 1..20: mol_type = other RNA
cgaggtcaggagagagacca

SEQ ID NO: 6337 - RNA, 20 nt, synthetic construct
  misc_feature 1..20: note = spacer sequence
  source 1..20: mol_type = other RNA
gcctgtctcagcctcccaaa

SEQ ID NO: 6338 - RNA, 20 nt, synthetic construct
  misc_feature 1..20: note = spacer sequence
  source 1..20: mol_type = other RNA
cagcctcccaaagtgctggg

SEQ ID NO: 6339 - RNA, 20 nt, synthetic construct
  misc_feature 1..20: note = spacer sequence
  source 1..20: mol_type = other RNA
gcctcccaaagtgctgggat

SEQ ID NO: 6340 - RNA, 20 nt, synthetic construct
  misc_feature 1..20: note = spacer sequence
  source 1..20: mol_type = other RNA
caaagtgctgggattacagg

SEQ ID NO: 6341 - RNA, 20 nt, synthetic construct
  misc_feature 1..20: note = spacer sequence
  source 1..20: mol_type = other RNA
cagcactttgggaggctgag

SEQ ID NO: 6342 - RNA, 20 nt, synthetic construct
  misc_feature 1..20: note = spacer sequence
  source 1..20: mol_type = other RNA
tgcctgtaatcccagcactt

SEQ ID NO: 6343 - RNA, 20 nt, synthetic construct
  misc_feature 1..20: note = spacer sequence
  source 1..20: mol_type = other RNA
ggctgggtgcggtggctcat

SEQ ID NO: 6344 - RNA, 20 nt, synthetic construct
  misc_feature 1..20: note = spacer sequence
  source 1..20: mol_type = other RNA
tctggctgggtgcggtggct

SEQ ID NO: 6345 - RNA, 20 nt, synthetic construct
  misc_feature 1..20: note = spacer sequence
  source 1..20: mol_type = other RNA
ttaaaaaacaccctcttctg

SEQ ID NO: 6346 - RNA, 20 nt, synthetic construct
  misc_feature 1..20: note = spacer sequence
  source 1..20: mol_type = other RNA
tatttgccttctttaaaaaa

SEQ ID NO: 6347 - RNA, 20 nt, synthetic construct
  misc_feature 1..20: note = spacer sequence
  source 1..20: mol_type = other RNA
taacttttgtaatgatccca

SEQ ID NO: 6348 - RNA, 20 nt, synthetic construct
  misc_feature 1..20: note = spacer sequence
  source 1..20: mol_type = other RNA
ttacaaaagttaagagccca

SEQ ID NO: 6349 - RNA, 20 nt, synthetic construct
  misc_feature 1..20: note = spacer sequence
  source 1..20: mol_type = other RNA
caggtgtttgagctgggggt

SEQ ID NO: 6350 - RNA, 20 nt, synthetic construct
  misc_feature 1..20: note = spacer sequence
  source 1..20: mol_type = other RNA
aacacctgggatcattacaa

SEQ ID NO: 6351 - RNA, 20 nt, synthetic construct
  misc_feature 1..20: note = spacer sequence
  source 1..20: mol_type = other RNA
acccccagctcaaacacctg

SEQ ID NO: 6352 - RNA, 20 nt, synthetic construct
  misc_feature 1..20: note = spacer sequence
  source 1..20: mol_type = other RNA
agcaaaggggctgcatttat

SEQ ID NO: 6353 - RNA, 20 nt, synthetic construct
  misc_feature 1..20: note = spacer sequence
  source 1..20: mol_type = other RNA
aggcacccaccctcaacccc

SEQ ID NO: 6354 - RNA, 20 nt, synthetic construct
  misc_feature 1..20: note = spacer sequence
  source 1..20: mol_type = other RNA
tacatggcattatgcaaata

SEQ ID NO: 6355 - RNA, 20 nt, synthetic construct
  misc_feature 1..20: note = spacer sequence
  source 1..20: mol_type = other RNA
acaccccaaacacaggcttc

SEQ ID NO: 6356 - RNA, 20 nt, synthetic construct
  misc_feature 1..20: note = spacer sequence
  source 1..20: mol_type = other RNA
tagtgggaccaaagtatgat

SEQ ID NO: 6357 - RNA, 20 nt, synthetic construct
  misc_feature 1..20: note = spacer sequence
  source 1..20: mol_type = other RNA
cactaagaagcctgtgtttg

SEQ ID NO: 6358 - RNA, 20 nt, synthetic construct
  misc_feature 1..20: note = spacer sequence
  source 1..20: mol_type = other RNA
tactttggtcccactaagaa

SEQ ID NO: 6359 - RNA, 20 nt, synthetic construct
  misc_feature 1..20: note = spacer sequence
  source 1..20: mol_type = other RNA
gtttgtatcatactttggtc

SEQ ID NO: 6360 - RNA, 20 nt, synthetic construct
  misc_feature 1..20: note = spacer sequence
  source 1..20: mol_type = other RNA
tcagtttgtatcatactttg

SEQ ID NO: 6361 - RNA, 20 nt, synthetic construct
  misc_feature 1..20: note = spacer sequence
  source 1..20: mol_type = other RNA
atcttcagtttgtatcatac

SEQ ID NO: 6362 - RNA, 20 nt, synthetic construct
  misc_feature 1..20: note = spacer sequence
  source 1..20: mol_type = other RNA
gcattccatcttcagtttgt

SEQ ID NO: 6363 - RNA, 20 nt, synthetic construct
  misc_feature 1..20: note = spacer sequence
  source 1..20: mol_type = other RNA
tctgcattccatcttcagtt

SEQ ID NO: 6364 - RNA, 20 nt, synthetic construct
  misc_feature 1..20: note = spacer sequence
  source 1..20: mol_type = other RNA
aaagtaccaataatcctctg

SEQ ID NO: 6365 - RNA, 20 nt, synthetic construct
  misc_feature 1..20: note = spacer sequence
  source 1..20: mol_type = other RNA
ggcaacccctgaaccagagt

SEQ ID NO: 6366 - RNA, 20 nt, synthetic construct
  misc_feature 1..20: note = spacer sequence
  source 1..20: mol_type = other RNA
ggggttgcctgattttttaa

SEQ ID NO: 6367 - RNA, 20 nt, synthetic construct
  misc_feature 1..20: note = spacer sequence
  source 1..20: mol_type = other RNA
ggttcaggggttgcctgatt

SEQ ID NO: 6368 - RNA, 20 nt, synthetic construct
  misc_feature 1..20: note = spacer sequence
  source 1..20: mol_type = other RNA
gagaaactgccaaattttat

SEQ ID NO: 6369 - RNA, 20 nt, synthetic construct
  misc_feature 1..20: note = spacer sequence
  source 1..20: mol_type = other RNA
gaacctactctggttcaggg

SEQ ID NO: 6370 - RNA, 20 nt, synthetic construct
  misc_feature 1..20: note = spacer sequence
  source 1..20: mol_type = other RNA
ctgaacctactctggttcag

SEQ ID NO: 6371 - RNA, 20 nt, synthetic construct
  misc_feature 1..20: note = spacer sequence
  source 1..20: mol_type = other RNA
taatttgggattggaagcaa

SEQ ID NO: 6372 - RNA, 20 nt, synthetic construct
  misc_feature 1..20: note = spacer sequence
  source 1..20: mol_type = other RNA
caaattaagaaaataaaatt

SEQ ID NO: 6373 - RNA, 20 nt, synthetic construct
  misc_feature 1..20: note = spacer sequence
  source 1..20: mol_type = other RNA
aatcccaaattaagaaaata

SEQ ID NO: 6374 - RNA, 20 nt, synthetic construct
  misc_feature 1..20: note = spacer sequence
  source 1..20: mol_type = other RNA
gttaacttgcttccaatccc

SEQ ID NO: 6375 - RNA, 20 nt, synthetic construct
  misc_feature 1..20: note = spacer sequence
  source 1..20: mol_type = other RNA
taaacttctgttaacttgct

SEQ ID NO: 6376 - RNA, 20 nt, synthetic construct
  misc_feature 1..20: note = spacer sequence
  source 1..20: mol_type = other RNA
ctaaatgcaacttaactcat

SEQ ID NO: 6377 - RNA, 20 nt, synthetic construct
  misc_feature 1..20: note = spacer sequence
  source 1..20: mol_type = other RNA
tttgccatatttgagtaata

SEQ ID NO: 6378 - RNA, 20 nt, synthetic construct
  misc_feature 1..20: note = spacer sequence
  source 1..20: mol_type = other RNA
aatatggcaaaagatcacta

SEQ ID NO: 6379 - RNA, 20 nt, synthetic construct
  misc_feature 1..20: note = spacer sequence
  source 1..20: mol_type = other RNA
gatttttttgtttatagatt

SEQ ID NO: 6380 - RNA, 20 nt, synthetic construct
  misc_feature 1..20: note = spacer sequence
  source 1..20: mol_type = other RNA
gattattactcaaatatggc

SEQ ID NO: 6381 - RNA, 20 nt, synthetic construct
  misc_feature 1..20: note = spacer sequence
  source 1..20: mol_type = other RNA
ataaacaaaaaaatcagatt

SEQ ID NO: 6382 - RNA, 20 nt, synthetic construct
  misc_feature 1..20: note = spacer sequence
  source 1..20: mol_type = other RNA
tcttaaattaactttattca

SEQ ID NO: 6383 - RNA, 20 nt, synthetic construct
  misc_feature 1..20: note = spacer sequence
  source 1..20: mol_type = other RNA
taaattaactttattcatct

SEQ ID NO: 6384 - RNA, 20 nt, synthetic construct
  misc_feature 1..20: note = spacer sequence
  source 1..20: mol_type = other RNA
tcttgctaatttagtttcaa

SEQ ID NO: 6385 - RNA, 20 nt, synthetic construct
  misc_feature 1..20: note = spacer sequence
  source 1..20: mol_type = other RNA
tgctaatttagtttcaaata

SEQ ID NO: 6386 - RNA, 20 nt, synthetic construct
  misc_feature 1..20: note = spacer sequence
  source 1..20: mol_type = other RNA
aatagtgatttgtaatgatc

SEQ ID NO: 6387 - RNA, 20 nt, synthetic construct
  misc_feature 1..20: note = spacer sequence
  source 1..20: mol_type = other RNA
ctatttgaaactaaattagc

SEQ ID NO: 6388 - RNA, 20 nt, synthetic construct
  misc_feature 1..20: note = spacer sequence
  source 1..20: mol_type = other RNA
ttacaaatcactatttgaaa

SEQ ID NO: 6389 - RNA, 20 nt, synthetic construct
  misc_feature 1..20: note = spacer sequence
  source 1..20: mol_type = other RNA
gatttgatccatttctgtaa

SEQ ID NO: 6390 - RNA, 20 nt, synthetic construct
  misc_feature 1..20: note = spacer sequence
  source 1..20: mol_type = other RNA
gatcattacaaatcactatt

SEQ ID NO: 6391 - RNA, 20 nt, synthetic construct
  misc_feature 1..20: note = spacer sequence
  source 1..20: mol_type = other RNA
aatctgatcattacaaatca

SEQ ID NO: 6392 - RNA, 20 nt, synthetic construct
  misc_feature 1..20: note = spacer sequence
  source 1..20: mol_type = other RNA
atttctgtaattgctgaaat

SEQ ID NO: 6393 - RNA, 20 nt, synthetic construct
  misc_feature 1..20: note = spacer sequence
  source 1..20: mol_type = other RNA
gtaattgctgaaattccccc

SEQ ID NO: 6394 - RNA, 20 nt, synthetic construct
  misc_feature 1..20: note = spacer sequence
  source 1..20: mol_type = other RNA
gcaattacagaaatggatca

SEQ ID NO: 6395 - RNA, 20 nt, synthetic construct
  misc_feature 1..20: note = spacer sequence
  source 1..20: mol_type = other RNA
cccgagttgctttttggctt

SEQ ID NO: 6396 - RNA, 20 nt, synthetic construct
  misc_feature 1..20: note = spacer sequence
  source 1..20: mol_type = other RNA
ggggaatttcagcaattaca

SEQ ID NO: 6397 - RNA, 20 nt, synthetic construct
  misc_feature 1..20: note = spacer sequence
  source 1..20: mol_type = other RNA
ggtctgggaggtgattgctc

SEQ ID NO: 6398 - RNA, 20 nt, synthetic construct
  misc_feature 1..20: note = spacer sequence
  source 1..20: mol_type = other RNA
gggaggtgattgctctgctg

SEQ ID NO: 6399 - RNA, 20 nt, synthetic construct
  misc_feature 1..20: note = spacer sequence
  source 1..20: mol_type = other RNA
cagaccagaggcggtaaagc

SEQ ID NO: 6400 - RNA, 20 nt, synthetic construct
  misc_feature 1..20: note = spacer sequence
  source 1..20: mol_type = other RNA
cctcccagaccagaggcggt

SEQ ID NO: 6401 - RNA, 20 nt, synthetic construct
  misc_feature 1..20: note = spacer sequence
  source 1..20: mol_type = other RNA
gctgcttcctgtaacttgcc

SEQ ID NO: 6402 - RNA, 20 nt, synthetic construct
  misc_feature 1..20: note = spacer sequence
  source 1..20: mol_type = other RNA
tgtaacttgcctgcctttct

SEQ ID NO: 6403 - RNA, 20 nt, synthetic construct
  misc_feature 1..20: note = spacer sequence
  source 1..20: mol_type = other RNA
ccctgtgtgggactcctgcg

SEQ ID NO: 6404 - RNA, 20 nt, synthetic construct
  misc_feature 1..20: note = spacer sequence
  source 1..20: mol_type = other RNA
ctgtgtgggactcctgcggg

SEQ ID NO: 6405 - RNA, 20 nt, synthetic construct
  misc_feature 1..20: note = spacer sequence
  source 1..20: mol_type = other RNA
cacacagggagaaaggcagg

SEQ ID NO: 6406 - RNA, 20 nt, synthetic construct
  misc_feature 1..20: note = spacer sequence
  source 1..20: mol_type = other RNA
tgcgggtgagagcgtggctg

SEQ ID NO: 6407 - RNA, 20 nt, synthetic construct
  misc_feature 1..20: note = spacer sequence
  source 1..20: mol_type = other RNA
cccgcaggagtcccacacag

SEQ ID NO: 6408 - RNA, 20 nt, synthetic construct
  misc_feature 1..20: note = spacer sequence
  source 1..20: mol_type = other RNA
cacccgcaggagtcccacac

SEQ ID NO: 6409 - RNA, 20 nt, synthetic construct
  misc_feature 1..20: note = spacer sequence
  source 1..20: mol_type = other RNA
gccacgctctcacccgcagg

SEQ ID NO: 6410 - RNA, 20 nt, synthetic construct
  misc_feature 1..20: note = spacer sequence
  source 1..20: mol_type = other RNA
tcagccacgctctcacccgc

SEQ ID NO: 6411 - RNA, 20 nt, synthetic construct
  misc_feature 1..20: note = spacer sequence
  source 1..20: mol_type = other RNA
taacacggctgtcttcagcc

SEQ ID NO: 6412 - RNA, 20 nt, synthetic construct
  misc_feature 1..20: note = spacer sequence
  source 1..20: mol_type = other RNA
tgtgctgtcgaggttgtgct

SEQ ID NO: 6413 - RNA, 20 nt, synthetic construct
  misc_feature 1..20: note = spacer sequence
  source 1..20: mol_type = other RNA
aggttgtgctctgtgaatgt

SEQ ID NO: 6414 - RNA, 20 nt, synthetic construct
  misc_feature 1..20: note = spacer sequence
  source 1..20: mol_type = other RNA
acagcacaggaggccctttc

SEQ ID NO: 6415 - RNA, 20 nt, synthetic construct
  misc_feature 1..20: note = spacer sequence
  source 1..20: mol_type = other RNA
gtgaatgtcatcccctggtg

SEQ ID NO: 6416 - RNA, 20 nt, synthetic construct
  misc_feature 1..20: note = spacer sequence
  source 1..20: mol_type = other RNA
cagagcacaacctcgacagc

SEQ ID NO: 6417 - RNA, 20 nt, synthetic construct
  misc_feature 1..20: note = spacer sequence
  source 1..20: mol_type = other RNA
tcccctggtgcacagcagca

SEQ ID NO: 6418 - RNA, 20 nt, synthetic construct
  misc_feature 1..20: note = spacer sequence
  source 1..20: mol_type = other RNA
cctggtgcacagcagcacct

SEQ ID NO: 6419 - RNA, 20 nt, synthetic construct
  misc_feature 1..20: note = spacer sequence
  source 1..20: mol_type = other RNA
acacaggatacagttggaat

SEQ ID NO: 6420 - RNA, 20 nt, synthetic construct
  misc_feature 1..20: note = spacer sequence
  source 1..20: mol_type = other RNA
tgtgtagaaggtgctgctgt

SEQ ID NO: 6421 - RNA, 20 nt, synthetic construct
  misc_feature 1..20: note = spacer sequence
  source 1..20: mol_type = other RNA
aactgtatcctgtgtagaag

SEQ ID NO: 6422 - RNA, 20 nt, synthetic construct
  misc_feature 1..20: note = spacer sequence
  source 1..20: mol_type = other RNA
agttgtgtaaggcagcagcc

SEQ ID NO: 6423 - RNA, 20 nt, synthetic construct
  misc_feature 1..20: note = spacer sequence
  source 1..20: mol_type = other RNA
agggggcggcattccaactg

SEQ ID NO: 6424 - RNA, 20 nt, synthetic construct
  misc_feature 1..20: note = spacer sequence
  source 1..20: mol_type = other RNA
tatgtgcaagggccaaggct

SEQ ID NO: 6425 - RNA, 20 nt, synthetic construct
  misc_feature 1..20: note = spacer sequence
  source 1..20: mol_type = other RNA
acagcatcttatgtgcaagg

SEQ ID NO: 6426 - RNA, 20 nt, synthetic construct
  misc_feature 1..20: note = spacer sequence
  source 1..20: mol_type = other RNA
gcctgcaccaagtaaagggc

SEQ ID NO: 6427 - RNA, 20 nt, synthetic construct
  misc_feature 1..20: note = spacer sequence
  source 1..20: mol_type = other RNA
gtgccctttacttggtgcag

SEQ ID NO: 6428 - RNA, 20 nt, synthetic construct
  misc_feature 1..20: note = spacer sequence
  source 1..20: mol_type = other RNA
atctgtgccctttacttggt

SEQ ID NO: 6429 - RNA, 20 nt, synthetic construct
  misc_feature 1..20: note = spacer sequence
  source 1..20: mol_type = other RNA
ccagcaacatatgccaagca

SEQ ID NO: 6430 - RNA, 20 nt, synthetic construct
  misc_feature 1..20: note = spacer sequence
  source 1..20: mol_type = other RNA
ccccagcaacatatgccaag

SEQ ID NO: 6431 - RNA, 20 nt, synthetic construct
  misc_feature 1..20: note = spacer sequence
  source 1..20: mol_type = other RNA
tctccccagcaacatatgcc

SEQ ID NO: 6432 - RNA, 20 nt, synthetic construct
  misc_feature 1..20: note = spacer sequence
  source 1..20: mol_type = other RNA
taagaatttggatcataacc

SEQ ID NO: 6433 - RNA, 20 nt, synthetic construct
  misc_feature 1..20: note = spacer sequence
  source 1..20: mol_type = other RNA
taagaacgtagtatacttta

SEQ ID NO: 6434 - RNA, 20 nt, synthetic construct
  misc_feature 1..20: note = spacer sequence
  source 1..20: mol_type = other RNA
aaattcttaagaacgtagta

SEQ ID NO: 6435 - RNA, 20 nt, synthetic construct
  misc_feature 1..20: note = spacer sequence
  source 1..20: mol_type = other RNA
taaccatgggattttaataa

SEQ ID NO: 6436 - RNA, 20 nt, synthetic construct
  misc_feature 1..20: note = spacer sequence
  source 1..20: mol_type = other RNA
catggttatgatccaaattc

SEQ ID NO: 6437 - RNA, 20 nt, synthetic construct
  misc_feature 1..20: note = spacer sequence
  source 1..20: mol_type = other RNA
attattaaaatcccatggtt

SEQ ID NO: 6438 - RNA, 20 nt, synthetic construct
  misc_feature 1..20: note = spacer sequence
  source 1..20: mol_type = other RNA
acagtttttctattattaaa

SEQ ID NO: 6439 - RNA, 20 nt, synthetic construct
  misc_feature 1..20: note = spacer sequence
  source 1..20: mol_type = other RNA
tcaacagtttttctattatt

SEQ ID NO: 6440 - RNA, 20 nt, synthetic construct
  misc_feature 1..20: note = spacer sequence
  source 1..20: mol_type = other RNA
gtctggtcccttatttttac

SEQ ID NO: 6441 - RNA, 20 nt, synthetic construct
  misc_feature 1..20: note = spacer sequence
  source 1..20: mol_type = other RNA
ggtcccttatttttacagtg

SEQ ID NO: 6442 - RNA, 20 nt, synthetic construct
  misc_feature 1..20: note = spacer sequence
  source 1..20: mol_type = other RNA
cttatttttacagtgaagaa

SEQ ID NO: 6443 - RNA, 20 nt, synthetic construct
  misc_feature 1..20: note = spacer sequence
  source 1..20: mol_type = other RNA
ctgtaaaaataagggaccag

SEQ ID NO: 6444 - RNA, 20 nt, synthetic construct
  misc_feature 1..20: note = spacer sequence
  source 1..20: mol_type = other RNA
tcactgtaaaaataagggac

SEQ ID NO: 6445 - RNA, 20 nt, synthetic construct
  misc_feature 1..20: note = spacer sequence
  source 1..20: mol_type = other RNA
gggctttggcttcttcactg

SEQ ID NO: 6446 - RNA, 20 nt, synthetic construct
  misc_feature 1..20: note = spacer sequence
  source 1..20: mol_type = other RNA
ctgggctttggcttcttcac

SEQ ID NO: 6447 - RNA, 20 nt, synthetic construct
  misc_feature 1..20: note = spacer sequence
  source 1..20: mol_type = other RNA
gacagtagttagaacttggt

SEQ ID NO: 6448 - RNA, 20 nt, synthetic construct
  misc_feature 1..20: note = spacer sequence
  source 1..20: mol_type = other RNA
gacacttgtaaagttaacac

SEQ ID NO: 6449 - RNA, 20 nt, synthetic construct
  misc_feature 1..20: note = spacer sequence
  source 1..20: mol_type = other RNA
aactactgtctgacacttgt

SEQ ID NO: 6450 - RNA, 20 nt, synthetic construct
  misc_feature 1..20: note = spacer sequence
  source 1..20: mol_type = other RNA
aaaaaaaaaaaaaaaaaacc

SEQ ID NO: 6451 - RNA, 20 nt, synthetic construct
  misc_feature 1..20: note = spacer sequence
  source 1..20: mol_type = other RNA
caaaaaaaaaaaaaaaaaaa

SEQ ID NO: 6452 - RNA, 20 nt, synthetic construct
  misc_feature 1..20: note = spacer sequence
  source 1..20: mol_type = other RNA
atctcaaaaaaaaaaaaaaa

SEQ ID NO: 6453 - RNA, 20 nt, synthetic construct
  misc_feature 1..20: note = spacer sequence
  source 1..20: mol_type = other RNA
tgctctgttgcccaggctgg

SEQ ID NO: 6454 - RNA, 20 nt, synthetic construct
  misc_feature 1..20: note = spacer sequence
  source 1..20: mol_type = other RNA
gttgcccaggctggagtgca

SEQ ID NO: 6455 - RNA, 20 nt, synthetic construct
  misc_feature 1..20: note = spacer sequence
  source 1..20: mol_type = other RNA
agcctgggcaacagagcaag

SEQ ID NO: 6456 - RNA, 20 nt, synthetic construct
  misc_feature 1..20: note = spacer sequence
  source 1..20: mol_type = other RNA
caccactgcactccagcctg

SEQ ID NO: 6457 - RNA, 20 nt, synthetic construct
  misc_feature 1..20: note = spacer sequence
  source 1..20: mol_type = other RNA
cagctcactgcaacctctgc

SEQ ID NO: 6458 - RNA, 20 nt, synthetic construct
  misc_feature 1..20: note = spacer sequence
  source 1..20: mol_type = other RNA
gctcactgcaacctctgcct

SEQ ID NO: 6459 - RNA, 20 nt, synthetic construct
  misc_feature 1..20: note = spacer sequence
  source 1..20: mol_type = other RNA
ctgcaacctctgcctcccag

SEQ ID NO: 6460 - RNA, 20 nt, synthetic construct
  misc_feature 1..20: note = spacer sequence
  source 1..20: mol_type = other RNA
gcctcccaggttcaagcgat

SEQ ID NO: 6461 - RNA, 20 nt, synthetic construct
  misc_feature 1..20: note = spacer sequence
  source 1..20: mol_type = other RNA
caggttcaagcgattctcct

SEQ ID NO: 6462 - RNA, 20 nt, synthetic construct
  misc_feature 1..20: note = spacer sequence
  source 1..20: mol_type = other RNA
agcgattctcctgcctcagc

SEQ ID NO: 6463 - RNA, 20 nt, synthetic construct
  misc_feature 1..20: note = spacer sequence
  source 1..20: mol_type = other RNA
cttgaacctgggaggcagag

SEQ ID NO: 6464 - RNA, 20 nt, synthetic construct
  misc_feature 1..20: note = spacer sequence
  source 1..20: mol_type = other RNA
cctgcctcagcctactaagt

SEQ ID NO: 6465 - RNA, 20 nt, synthetic construct
  misc_feature 1..20: note = spacer sequence
  source 1..20: mol_type = other RNA
tgcctcagcctactaagtag

SEQ ID NO: 6466 - RNA, 20 nt, synthetic construct
  misc_feature 1..20: note = spacer sequence
  source 1..20: mol_type = other RNA
gcctactaagtagctgggac

SEQ ID NO: 6467 - RNA, 20 nt, synthetic construct
  misc_feature 1..20: note = spacer sequence
  source 1..20: mol_type = other RNA
cagctacttagtaggctgag

SEQ ID NO: 6468 - RNA, 20 nt, synthetic construct
  misc_feature 1..20: note = spacer sequence
  source 1..20: mol_type = other RNA
gtagagacagggttttgcta

SEQ ID NO: 6469 - RNA, 20 nt, synthetic construct
  misc_feature 1..20: note = spacer sequence
  source 1..20: mol_type = other RNA
actgaaaaaatacaaaaatt

SEQ ID NO: 6470 - RNA, 20 nt, synthetic construct
  misc_feature 1..20: note = spacer sequence
  source 1..20: mol_type = other RNA
ctactgaaaaaatacaaaaa

SEQ ID NO: 6471 - RNA, 20 nt, synthetic construct
  misc_feature 1..20: note = spacer sequence
  source 1..20: mol_type = other RNA
caaactcctgacctcagatg

SEQ ID NO: 6472 - RNA, 20 nt, synthetic construct
  misc_feature 1..20: note = spacer sequence
  source 1..20: mol_type = other RNA
aactcctgacctcagatgat

SEQ ID NO: 6473 - RNA, 20 nt, synthetic construct
  misc_feature 1..20: note = spacer sequence
  source 1..20: mol_type = other RNA
tgacctcagatgatccagcc

SEQ ID NO: 6474 - RNA, 20 nt, synthetic construct
  misc_feature 1..20: note = spacer sequence
  source 1..20: mol_type = other RNA
ggagtttgagaccagcctgg

SEQ ID NO: 6475 - RNA, 20 nt, synthetic construct
  misc_feature 1..20: note = spacer sequence
  source 1..20: mol_type = other RNA
gatgatccagccacctcagc

SEQ ID NO: 6476 - RNA, 20 nt, synthetic construct
  misc_feature 1..20: note = spacer sequence
  source 1..20: mol_type = other RNA
gaggtcaggagtttgagacc

SEQ ID NO: 6477 - RNA, 20 nt, synthetic construct
  misc_feature 1..20: note = spacer sequence
  source 1..20: mol_type = other RNA
tctgaggtcaggagtttgag

SEQ ID NO: 6478 - RNA, 20 nt, synthetic construct
  misc_feature 1..20: note = spacer sequence
  source 1..20: mol_type = other RNA
agccacctcagcttcccaaa

SEQ ID NO: 6479 - RNA, 20 nt, synthetic construct
  misc_feature 1..20: note = spacer sequence
  source 1..20: mol_type = other RNA
gcttcccaaagtgctggggt

SEQ ID NO: 6480 - RNA, 20 nt, synthetic construct
  misc_feature 1..20: note = spacer sequence
  source 1..20: mol_type = other RNA
caaagtgctggggttccagg

SEQ ID NO: 6481 - RNA, 20 nt, synthetic construct
  misc_feature 1..20: note = spacer sequence
  source 1..20: mol_type = other RNA
aggtgttagccaccatgcct

SEQ ID NO: 6482 - RNA, 20 nt, synthetic construct
  misc_feature 1..20: note = spacer sequence
  source 1..20: mol_type = other RNA
atggccaggcatggtggcta

SEQ ID NO: 6483 - RNA, 20 nt, synthetic construct
  misc_feature 1..20: note = spacer sequence
  source 1..20: mol_type = other RNA
gttcccttctcactgtggct

SEQ ID NO: 6484 - RNA, 20 nt, synthetic construct
  misc_feature 1..20: note = spacer sequence
  source 1..20: mol_type = other RNA
cttctcactgtggctgtacc

SEQ ID NO: 6485 - RNA, 20 nt, synthetic construct
  misc_feature 1..20: note = spacer sequence
  source 1..20: mol_type = other RNA
cactgtggctgtaccaaggt

SEQ ID NO: 6486 - RNA, 20 nt, synthetic construct
  misc_feature 1..20: note = spacer sequence
  source 1..20: mol_type = other RNA
ctgtggctgtaccaaggtgt

SEQ ID NO: 6487 - RNA, 20 nt, synthetic construct
  misc_feature 1..20: note = spacer sequence
  source 1..20: mol_type = other RNA
cagaagtcgtgatgcaggtc

SEQ ID NO: 6488 - RNA, 20 nt, synthetic construct
  misc_feature 1..20: note = spacer sequence
  source 1..20: mol_type = other RNA
gggataagcaacaccttggt

SEQ ID NO: 6489 - RNA, 20 nt, synthetic construct
  misc_feature 1..20: note = spacer sequence
  source 1..20: mol_type = other RNA
tgatgcaggtcagcactttc

SEQ ID NO: 6490 - RNA, 20 nt, synthetic construct
  misc_feature 1..20: note = spacer sequence
  source 1..20: mol_type = other RNA
cgacttctgggataagcaac

SEQ ID NO: 6491 - RNA, 20 nt, synthetic construct
  misc_feature 1..20: note = spacer sequence
  source 1..20: mol_type = other RNA
gcactttctccatgggaagt

SEQ ID NO: 6492 - RNA, 20 nt, synthetic construct
  misc_feature 1..20: note = spacer sequence
  source 1..20: mol_type = other RNA
ccatgggaagttttagcagt

SEQ ID NO: 6493 - RNA, 20 nt, synthetic construct
  misc_feature 1..20: note = spacer sequence
  source 1..20: mol_type = other RNA
atgggaagttttagcagtgt

SEQ ID NO: 6494 - RNA, 20 nt, synthetic construct
  misc_feature 1..20: note = spacer sequence
  source 1..20: mol_type = other RNA
catggagaaagtgctgacct

SEQ ID NO: 6495 - RNA, 20 nt, synthetic construct
  misc_feature 1..20: note = spacer sequence
  source 1..20: mol_type = other RNA
ttttagaatgtatttgggaa

SEQ ID NO: 6496 - RNA, 20 nt, synthetic construct
  misc_feature 1..20: note = spacer sequence
  source 1..20: mol_type = other RNA
aaaaagaaacactgctaaaa

SEQ ID NO: 6497 - RNA, 20 nt, synthetic construct
  misc_feature 1..20: note = spacer sequence
  source 1..20: mol_type = other RNA
caaatacattctaaaaagaa

SEQ ID NO: 6498 - RNA, 20 nt, synthetic construct
  misc_feature 1..20: note = spacer sequence
  source 1..20: mol_type = other RNA
taatttagcttttttttctt

SEQ ID NO: 6499 - RNA, 20 nt, synthetic construct
  misc_feature 1..20: note = spacer sequence
  source 1..20: mol_type = other RNA
tcttcttataaataggctgt

SEQ ID NO: 6500 - RNA, 20 nt, synthetic construct
  misc_feature 1..20: note = spacer sequence
  source 1..20: mol_type = other RNA
tcttataaataggctgtacc

SEQ ID NO: 6501 - RNA, 20 nt, synthetic construct
  misc_feature 1..20: note = spacer sequence
  source 1..20: mol_type = other RNA
tataaataggctgtaccagt

SEQ ID NO: 6502 - RNA, 20 nt, synthetic construct
  misc_feature 1..20: note = spacer sequence
  source 1..20: mol_type = other RNA
tcactttaatcctctatcca

SEQ ID NO: 6503 - RNA, 20 nt, synthetic construct
  misc_feature 1..20: note = spacer sequence
  source 1..20: mol_type = other RNA
ctttaatcctctatccagaa

SEQ ID NO: 6504 - RNA, 20 nt, synthetic construct
  misc_feature 1..20: note = spacer sequence
  source 1..20: mol_type = other RNA
tctatccagaaaacacggtg

SEQ ID NO: 6505 - RNA, 20 nt, synthetic construct
  misc_feature 1..20: note = spacer sequence
  source 1..20: mol_type = other RNA
atccagaaaacacggtgggc

SEQ ID NO: 6506 - RNA, 20 nt, synthetic construct
  misc_feature 1..20: note = spacer sequence
  source 1..20: mol_type = other RNA
agaaaacacggtgggccaaa

SEQ ID NO: 6507 - RNA, 20 nt, synthetic construct
  misc_feature 1..20: note = spacer sequence
  source 1..20: mol_type = other RNA
ggatagaggattaaagtgag

SEQ ID NO: 6508 - RNA, 20 nt, synthetic construct
  misc_feature 1..20: note = spacer sequence
  source 1..20: mol_type = other RNA
tttggcccaccgtgttttct

SEQ ID NO: 6509 - RNA, 20 nt, synthetic construct
  misc_feature 1..20: note = spacer sequence
  source 1..20: mol_type = other RNA
tcctttggcccaccgtgttt

SEQ ID NO: 6510 - RNA, 20 nt, synthetic construct
  misc_feature 1..20: note = spacer sequence
  source 1..20: mol_type = other RNA
tcatcctttggcccaccgtg

SEQ ID NO: 6511 - RNA, 20 nt, synthetic construct
  misc_feature 1..20: note = spacer sequence
  source 1..20: mol_type = other RNA
cttcatcctttggcccaccg

SEQ ID NO: 6512 - RNA, 20 nt, synthetic construct
  misc_feature 1..20: note = spacer sequence
  source 1..20: mol_type = other RNA
tgttacctctcttcatcctt

SEQ ID NO: 6513 - RNA, 20 nt, synthetic construct
  misc_feature 1..20: note = spacer sequence
  source 1..20: mol_type = other RNA
tgtaataatggcgatagctt

SEQ ID NO: 6514 - RNA, 20 nt, synthetic construct
  misc_feature 1..20: note = spacer sequence
  source 1..20: mol_type = other RNA
ccattattacaagagttaag

SEQ ID NO: 6515 - RNA, 20 nt, synthetic construct
  misc_feature 1..20: note = spacer sequence
  source 1..20: mol_type = other RNA
ggagttcatatggtatacta

SEQ ID NO: 6516 - RNA, 20 nt, synthetic construct
  misc_feature 1..20: note = spacer sequence
  source 1..20: mol_type = other RNA
agaaagctatcgccattatt

SEQ ID NO: 6517 - RNA, 20 nt, synthetic construct
  misc_feature 1..20: note = spacer sequence
  source 1..20: mol_type = other RNA
tatggtatactacttgtaaa

SEQ ID NO: 6518 - RNA, 20 nt, synthetic construct
  misc_feature 1..20: note = spacer sequence
  source 1..20: mol_type = other RNA
tagcacatatttacaagtag

SEQ ID NO: 6519 - RNA, 20 nt, synthetic construct
  misc_feature 1..20: note = spacer sequence
  source 1..20: mol_type = other RNA
gtgtttcccccacctttgct

SEQ ID NO: 6520 - RNA, 20 nt, synthetic construct
  misc_feature 1..20: note = spacer sequence
  source 1..20: mol_type = other RNA
cccacctttgcttttgaact

SEQ ID NO: 6521 - RNA, 20 nt, synthetic construct
  misc_feature 1..20: note = spacer sequence
  source 1..20: mol_type = other RNA
aaagcaaaggtgggggaaac

SEQ ID NO: 6522 - RNA, 20 nt, synthetic construct
  misc_feature 1..20: note = spacer sequence
  source 1..20: mol_type = other RNA
gcaagttcaaaagcaaaggt

SEQ ID NO: 6523 - RNA, 20 nt, synthetic construct
  misc_feature 1..20: note = spacer sequence
  source 1..20: mol_type = other RNA
tctaaacccctgctcccaaa

SEQ ID NO: 6524 - RNA, 20 nt, synthetic construct
  misc_feature 1..20: note = spacer sequence
  source 1..20: mol_type = other RNA
aaacccctgctcccaaatgc

SEQ ID NO: 6525 - RNA, 20 nt, synthetic construct
  misc_feature 1..20: note = spacer sequence
  source 1..20: mol_type = other RNA
caaatgctggaatgctttta

SEQ ID NO: 6526 - RNA, 20 nt, synthetic construct
  misc_feature 1..20: note = spacer sequence
  source 1..20: mol_type = other RNA
agcatttgggagcaggggtt

SEQ ID NO: 6527 - RNA, 20 nt, synthetic construct
  misc_feature 1..20: note = spacer sequence
  source 1..20: mol_type = other RNA
tgggcttaaaggaattgaca

SEQ ID NO: 6528 - RNA, 20 nt, synthetic construct
  misc_feature 1..20: note = spacer sequence
  source 1..20: mol_type = other RNA
tttaagcccaggaagtaaaa

SEQ ID NO: 6529 - RNA, 20 nt, synthetic construct
  misc_feature 1..20: note = spacer sequence
  source 1..20: mol_type = other RNA
attcctttaagcccaggaag

SEQ ID NO: 6530 - RNA, 20 nt, synthetic construct
  misc_feature 1..20: note = spacer sequence
  source 1..20: mol_type = other RNA
ccatttgtcaattcctttaa

SEQ ID NO: 6531 - RNA, 20 nt, synthetic construct
  misc_feature 1..20: note = spacer sequence
  source 1..20: mol_type = other RNA
ttttaagtgtccccatttgt

SEQ ID NO: 6532 - RNA, 20 nt, synthetic construct
  misc_feature 1..20: note = spacer sequence
  source 1..20: mol_type = other RNA
ataaatgctacaaaaccaaa

SEQ ID NO: 6533 - RNA, 20 nt, synthetic construct
  misc_feature 1..20: note = spacer sequence
  source 1..20: mol_type = other RNA
atattcaataaatgctacaa

SEQ ID NO: 6534 - RNA, 20 nt, synthetic construct
  misc_feature 1..20: note = spacer sequence
  source 1..20: mol_type = other RNA
cctttggcacttgtattagt

SEQ ID NO: 6535 - RNA, 20 nt, synthetic construct
  misc_feature 1..20: note = spacer sequence
  source 1..20: mol_type = other RNA
tgtattagttcccctttggc

SEQ ID NO: 6536 - RNA, 20 nt, synthetic construct
  misc_feature 1..20: note = spacer sequence
  source 1..20: mol_type = other RNA
tgaacagtactgtcaaccac

SEQ ID NO: 6537 - RNA, 20 nt, synthetic construct
  misc_feature 1..20: note = spacer sequence
  source 1..20: mol_type = other RNA
tgacatttcctgtattagtt

SEQ ID NO: 6538 - RNA, 20 nt, synthetic construct
  misc_feature 1..20: note = spacer sequence
  source 1..20: mol_type = other RNA
accactagcaaaatcaatca

SEQ ID NO: 6539 - RNA, 20 nt, synthetic construct
  misc_feature 1..20: note = spacer sequence
  source 1..20: mol_type = other RNA
atcatcattgtgaaacatag

SEQ ID NO: 6540 - RNA, 20 nt, synthetic construct
  misc_feature 1..20: note = spacer sequence
  source 1..20: mol_type = other RNA
tcattgtgaaacataggaag

SEQ ID NO: 6541 - RNA, 20 nt, synthetic construct
  misc_feature 1..20: note = spacer sequence
  source 1..20: mol_type = other RNA
ttgtgaaacataggaagctt

SEQ ID NO: 6542 - RNA, 20 nt, synthetic construct
  misc_feature 1..20: note = spacer sequence
  source 1..20: mol_type = other RNA
caatgatgattgattttgct

SEQ ID NO: 6543 - RNA, 20 nt, synthetic construct
  misc_feature 1..20: note = spacer sequence
  source 1..20: mol_type = other RNA
tatgtttcacaatgatgatt

SEQ ID NO: 6544 - RNA, 20 nt, synthetic construct
  misc_feature 1..20: note = spacer sequence
  source 1..20: mol_type = other RNA
gtagataaaaaaaaaaattg

SEQ ID NO: 6545 - RNA, 20 nt, synthetic construct
  misc_feature 1..20: note = spacer sequence
  source 1..20: mol_type = other RNA
acagaagcttcctatgtttc

SEQ ID NO: 6546 - RNA, 20 nt, synthetic construct
  misc_feature 1..20: note = spacer sequence
  source 1..20: mol_type = other RNA
atttttttttttatctacag

SEQ ID NO: 6547 - RNA, 20 nt, synthetic construct
  misc_feature 1..20: note = spacer sequence
  source 1..20: mol_type = other RNA
gtatcaatttttttttttat

SEQ ID NO: 6548 - RNA, 20 nt, synthetic construct
  misc_feature 1..20: note = spacer sequence
  source 1..20: mol_type = other RNA
agactccatttatatgtgta

SEQ ID NO: 6549 - RNA, 20 nt, synthetic construct
  misc_feature 1..20: note = spacer sequence
  source 1..20: mol_type = other RNA
actagttttcagtatcaatt

SEQ ID NO: 6550 - RNA, 20 nt, synthetic construct
  misc_feature 1..20: note = spacer sequence
  source 1..20: mol_type = other RNA
cgactagttttcagtatcaa

SEQ ID NO: 6551 - RNA, 20 nt, synthetic construct
  misc_feature 1..20: note = spacer sequence
  source 1..20: mol_type = other RNA
atttatatgtgtatgttttc

SEQ ID NO: 6552 - RNA, 20 nt, synthetic construct
  misc_feature 1..20: note = spacer sequence
  source 1..20: mol_type = other RNA
gaaagcctttcagaaaaata

SEQ ID NO: 6553 - RNA, 20 nt, synthetic construct
  misc_feature 1..20: note = spacer sequence
  source 1..20: mol_type = other RNA
gaaaacatacacatataaat

SEQ ID NO: 6554 - RNA, 20 nt, synthetic construct
  misc_feature 1..20: note = spacer sequence
  source 1..20: mol_type = other RNA
gaaaaatattaaatttaagg

SEQ ID NO: 6555 - RNA, 20 nt, synthetic construct
  misc_feature 1..20: note = spacer sequence
  source 1..20: mol_type = other RNA
gaaaggctttcagaaaacat

SEQ ID NO: 6556 - RNA, 20 nt, synthetic construct
  misc_feature 1..20: note = spacer sequence
  source 1..20: mol_type = other RNA
ttaaatttaatatttttctg

SEQ ID NO: 6557 - RNA, 20 nt, synthetic construct
  misc_feature 1..20: note = spacer sequence
  source 1..20: mol_type = other RNA
tgtccttaaatttaatattt

SEQ ID NO: 6558 - RNA, 20 nt, synthetic construct
  misc_feature 1..20: note = spacer sequence
  source 1..20: mol_type = other RNA
gaggccttgggacatagctt

SEQ ID NO: 6559 - RNA, 20 nt, synthetic construct
  misc_feature 1..20: note = spacer sequence
  source 1..20: mol_type = other RNA
gatataaaaatcttgtcctt

SEQ ID NO: 6560 - RNA, 20 nt, synthetic construct
  misc_feature 1..20: note = spacer sequence
  source 1..20: mol_type = other RNA
caaggcctctgatataaaaa

SEQ ID NO: 6561 - RNA, 20 nt, synthetic construct
  misc_feature 1..20: note = spacer sequence
  source 1..20: mol_type = other RNA
gtaactgagagtttaccctt

SEQ ID NO: 6562 - RNA, 20 nt, synthetic construct
  misc_feature 1..20: note = spacer sequence
  source 1..20: mol_type = other RNA
gttactgagttatgcctgtt

SEQ ID NO: 6563 - RNA, 20 nt, synthetic construct
  misc_feature 1..20: note = spacer sequence
  source 1..20: mol_type = other RNA
cagttactgagttatgcctg

SEQ ID NO: 6564 - RNA, 20 nt, synthetic construct
  misc_feature 1..20: note = spacer sequence
  source 1..20: mol_type = other RNA
gaaatcaggtgcagccccat

SEQ ID NO: 6565 - RNA, 20 nt, synthetic construct
  misc_feature 1..20: note = spacer sequence
  source 1..20: mol_type = other RNA
gaagtaccaaagggtaaact

SEQ ID NO: 6566 - RNA, 20 nt, synthetic construct
  misc_feature 1..20: note = spacer sequence
  source 1..20: mol_type = other RNA
ggtgcagccccatctttctt

SEQ ID NO: 6567 - RNA, 20 nt, synthetic construct
  misc_feature 1..20: note = spacer sequence
  source 1..20: mol_type = other RNA
ttcttcccagagcattagtg

SEQ ID NO: 6568 - RNA, 20 nt, synthetic construct
  misc_feature 1..20: note = spacer sequence
  source 1..20: mol_type = other RNA
tcccagagcattagtgtgta

SEQ ID NO: 6569 - RNA, 20 nt, synthetic construct
  misc_feature 1..20: note = spacer sequence
  source 1..20: mol_type = other RNA
cagagcattagtgtgtagac

SEQ ID NO: 6570 - RNA, 20 nt, synthetic construct
  misc_feature 1..20: note = spacer sequence
  source 1..20: mol_type = other RNA
gggaagaaagatggggctgc

SEQ ID NO: 6571 - RNA, 20 nt, synthetic construct
  misc_feature 1..20: note = spacer sequence
  source 1..20: mol_type = other RNA
acacactaatgctctgggaa

SEQ ID NO: 6572 - RNA, 20 nt, synthetic construct
  misc_feature 1..20: note = spacer sequence
  source 1..20: mol_type = other RNA
cgtctacacactaatgctct

SEQ ID NO: 6573 - RNA, 20 nt, synthetic construct
  misc_feature 1..20: note = spacer sequence
  source 1..20: mol_type = other RNA
aacaaggcttcacgtctaca

SEQ ID NO: 6574 - RNA, 20 nt, synthetic construct
  misc_feature 1..20: note = spacer sequence
  source 1..20: mol_type = other RNA
tcaaacaaggcttcacgtct

SEQ ID NO: 6575 - RNA, 20 nt, synthetic construct
  misc_feature 1..20: note = spacer sequence
  source 1..20: mol_type = other RNA
aaatacagctcttcaaacaa

SEQ ID NO: 6576 - RNA, 20 nt, synthetic construct
  misc_feature 1..20: note = spacer sequence
  source 1..20: mol_type = other RNA
actcagtcaagttttaattt

SEQ ID NO: 6577 - RNA, 20 nt, synthetic construct
  misc_feature 1..20: note = spacer sequence
  source 1..20: mol_type = other RNA
gtcaagttttaatttagctc

SEQ ID NO: 6578 - RNA, 20 nt, synthetic construct
  misc_feature 1..20: note = spacer sequence
  source 1..20: mol_type = other RNA
agttttaatttagctcatga

SEQ ID NO: 6579 - RNA, 20 nt, synthetic construct
  misc_feature 1..20: note = spacer sequence
  source 1..20: mol_type = other RNA
tgaactaccttgatgtttag

SEQ ID NO: 6580 - RNA, 20 nt, synthetic construct
  misc_feature 1..20: note = spacer sequence
  source 1..20: mol_type = other RNA
tgagctaaattaaaacttga

SEQ ID NO: 6581 - RNA, 20 nt, synthetic construct
  misc_feature 1..20: note = spacer sequence
  source 1..20: mol_type = other RNA
aggtagttcatgagctaaat

SEQ ID NO: 6582 - RNA, 20 nt, synthetic construct
  misc_feature 1..20: note = spacer sequence
  source 1..20: mol_type = other RNA
gccctaatccatctgatgct

SEQ ID NO: 6583 - RNA, 20 nt, synthetic construct
  misc_feature 1..20: note = spacer sequence
  source 1..20: mol_type = other RNA
atctgatgctttttcattat

SEQ ID NO: 6584 - RNA, 20 nt, synthetic construct
  misc_feature 1..20: note = spacer sequence
  source 1..20: mol_type = other RNA
gatgctttttcattattagg

SEQ ID NO: 6585 - RNA, 20 nt, synthetic construct
  misc_feature 1..20: note = spacer sequence
  source 1..20: mol_type = other RNA
gatggattagggctgatgcc

SEQ ID NO: 6586 - RNA, 20 nt, synthetic construct
  misc_feature 1..20: note = spacer sequence
  source 1..20: mol_type = other RNA
ttattaggcatgttggagac

SEQ ID NO: 6587 - RNA, 20 nt, synthetic construct
  misc_feature 1..20: note = spacer sequence
  source 1..20: mol_type = other RNA
aacatgcctaataatgaaaa

SEQ ID NO: 6588 - RNA, 20 nt, synthetic construct
  misc_feature 1..20: note = spacer sequence
  source 1..20: mol_type = other RNA
ccaacatgcctaataatgaa

SEQ ID NO: 6589 - RNA, 20 nt, synthetic construct
  misc_feature 1..20: note = spacer sequence
  source 1..20: mol_type = other RNA
cattgcccaagtctccaaca

SEQ ID NO: 6590 - RNA, 20 nt, synthetic construct
  misc_feature 1..20: note = spacer sequence
  source 1..20: mol_type = other RNA
gcagtcacattgcccaagtc

SEQ ID NO: 6591 - RNA, 20 nt, synthetic construct
  misc_feature 1..20: note = spacer sequence
  source 1..20: mol_type = other RNA
ttgtcagcagtcacattgcc

SEQ ID NO: 6592 - RNA, 20 nt, synthetic construct
  misc_feature 1..20: note = spacer sequence
  source 1..20: mol_type = other RNA
gccacaccatctttgtcagc

SEQ ID NO: 6593 - RNA, 20 nt, synthetic construct
  misc_feature 1..20: note = spacer sequence
  source 1..20: mol_type = other RNA
attgaagattctgtgatctc

SEQ ID NO: 6594 - RNA, 20 nt, synthetic construct
  misc_feature 1..20: note = spacer sequence
  source 1..20: mol_type = other RNA
atagacacatcggccacacc

SEQ ID NO: 6595 - RNA, 20 nt, synthetic construct
  misc_feature 1..20: note = spacer sequence
  source 1..20: mol_type = other RNA
tcaatagacacatcggccac

SEQ ID NO: 6596 - RNA, 20 nt, synthetic construct
  misc_feature 1..20: note = spacer sequence
  source 1..20: mol_type = other RNA
gtgatctcactctcaggaga

SEQ ID NO: 6597 - RNA, 20 nt, synthetic construct
  misc_feature 1..20: note = spacer sequence
  source 1..20: mol_type = other RNA
cagaatcttcaatagacaca

SEQ ID NO: 6598 - RNA, 20 nt, synthetic construct
  misc_feature 1..20: note = spacer sequence
  source 1..20: mol_type = other RNA
cactctcaggagaccattgc

SEQ ID NO: 6599 - RNA, 20 nt, synthetic construct
  misc_feature 1..20: note = spacer sequence
  source 1..20: mol_type = other RNA
ctctcaggagaccattgcat

SEQ ID NO: 6600 - RNA, 20 nt, synthetic construct
  misc_feature 1..20: note = spacer sequence
  source 1..20: mol_type = other RNA
caggagaccattgcatcatt

SEQ ID NO: 6601 - RNA, 20 nt, synthetic construct
  misc_feature 1..20: note = spacer sequence
  source 1..20: mol_type = other RNA
ggagaccattgcatcattgg

SEQ ID NO: 6602 - RNA, 20 nt, synthetic construct
  misc_feature 1..20: note = spacer sequence
  source 1..20: mol_type = other RNA
tgagagtgagatcacagaat

SEQ ID NO: 6603 - RNA, 20 nt, synthetic construct
  misc_feature 1..20: note = spacer sequence
  source 1..20: mol_type = other RNA
cctgagagtgagatcacaga

SEQ ID NO: 6604 - RNA, 20 nt, synthetic construct
  misc_feature 1..20: note = spacer sequence
  source 1..20: mol_type = other RNA
ttggccgcacactggtggta

SEQ ID NO: 6605 - RNA, 20 nt, synthetic construct
  misc_feature 1..20: note = spacer sequence
  source 1..20: mol_type = other RNA
taaaaggatatgcataaaac

SEQ ID NO: 6606 - RNA, 20 nt, synthetic construct
  misc_feature 1..20: note = spacer sequence
  source 1..20: mol_type = other RNA
ttttatgaaaacttaccacc

SEQ ID NO: 6607 - RNA, 20 nt, synthetic construct
  misc_feature 1..20: note = spacer sequence
  source 1..20: mol_type = other RNA
tctaacatacagtcatgtat

SEQ ID NO: 6608 - RNA, 20 nt, synthetic construct
  misc_feature 1..20: note = spacer sequence
  source 1..20: mol_type = other RNA
aacatacagtcatgtatctt

SEQ ID NO: 6609 - RNA, 20 nt, synthetic construct
  misc_feature 1..20: note = spacer sequence
  source 1..20: mol_type = other RNA
tgtatcttttcactttgatt

SEQ ID NO: 6610 - RNA, 20 nt, synthetic construct
  misc_feature 1..20: note = spacer sequence
  source 1..20: mol_type = other RNA
tttcactttgattgttagtc

SEQ ID NO: 6611 - RNA, 20 nt, synthetic construct
  misc_feature 1..20: note = spacer sequence
  source 1..20: mol_type = other RNA
ctttgattgttagtcgcggt

SEQ ID NO: 6612 - RNA, 20 nt, synthetic construct
  misc_feature 1..20: note = spacer sequence
  source 1..20: mol_type = other RNA
aagtgaaaagatacatgact

SEQ ID NO: 6613 - RNA, 20 nt, synthetic construct
  misc_feature 1..20: note = spacer sequence
  source 1..20: mol_type = other RNA
cggtttctaaagatccagat

SEQ ID NO: 6614 - RNA, 20 nt, synthetic construct
  misc_feature 1..20: note = spacer sequence
  source 1..20: mol_type = other RNA
aaagatccagataaactgta

SEQ ID NO: 6615 - RNA, 20 nt, synthetic construct
  misc_feature 1..20: note = spacer sequence
  source 1..20: mol_type = other RNA
ttagaaaccgcgactaacaa

SEQ ID NO: 6616 - RNA, 20 nt, synthetic construct
  misc_feature 1..20: note = spacer sequence
  source 1..20: mol_type = other RNA
agataaactgtacttgcagt

SEQ ID NO: 6617 - RNA, 20 nt, synthetic construct
  misc_feature 1..20: note = spacer sequence
  source 1..20: mol_type = other RNA
ggatctttagaaaccgcgac

SEQ ID NO: 6618 - RNA, 20 nt, synthetic construct
  misc_feature 1..20: note = spacer sequence
  source 1..20: mol_type = other RNA
aattaggaaaagcaatttta

SEQ ID NO: 6619 - RNA, 20 nt, synthetic construct
  misc_feature 1..20: note = spacer sequence
  source 1..20: mol_type = other RNA
taatttgaactgcaagtaca

SEQ ID NO: 6620 - RNA, 20 nt, synthetic construct
  misc_feature 1..20: note = spacer sequence
  source 1..20: mol_type = other RNA
aataaaattgcttttcctaa

SEQ ID NO: 6621 - RNA, 20 nt, synthetic construct
  misc_feature 1..20: note = spacer sequence
  source 1..20: mol_type = other RNA
ccgtaattgtccaataaaat

SEQ ID NO: 6622 - RNA, 20 nt, synthetic construct
  misc_feature 1..20: note = spacer sequence
  source 1..20: mol_type = other RNA
ttttcaccgtaattgtccaa

SEQ ID NO: 6623 - RNA, 20 nt, synthetic construct
  misc_feature 1..20: note = spacer sequence
  source 1..20: mol_type = other RNA
aggtcagttaagaacactgt

SEQ ID NO: 6624 - RNA, 20 nt, synthetic construct
  misc_feature 1..20: note = spacer sequence
  source 1..20: mol_type = other RNA
gttaagaacactgttctgct

SEQ ID NO: 6625 - RNA, 20 nt, synthetic construct
  misc_feature 1..20: note = spacer sequence
  source 1..20: mol_type = other RNA
taactgacctagataaaata

SEQ ID NO: 6626 - RNA, 20 nt, synthetic construct
  misc_feature 1..20: note = spacer sequence
  source 1..20: mol_type = other RNA
gctaagatgcagtaaaaagc

SEQ ID NO: 6627 - RNA, 20 nt, synthetic construct
  misc_feature 1..20: note = spacer sequence
  source 1..20: mol_type = other RNA
tagcagaacagtgttcttaa

SEQ ID NO: 6628 - RNA, 20 nt, synthetic construct
  misc_feature 1..20: note = spacer sequence
  source 1..20: mol_type = other RNA
aatgtaacctgctttttact

SEQ ID NO: 6629 - RNA, 20 nt, synthetic construct
  misc_feature 1..20: note = spacer sequence
  source 1..20: mol_type = other RNA
aatatggtcaaatgtaacct

SEQ ID NO: 6630 - RNA, 20 nt, synthetic construct
  misc_feature 1..20: note = spacer sequence
  source 1..20: mol_type = other RNA
gagtttggaaaacagaagta

SEQ ID NO: 6631 - RNA, 20 nt, synthetic construct
  misc_feature 1..20: note = spacer sequence
  source 1..20: mol_type = other RNA
gatctaatatggtcaaatgt

SEQ ID NO: 6632 - RNA, 20 nt, synthetic construct
  misc_feature 1..20: note = spacer sequence
  source 1..20: mol_type = other RNA
aaactcagatctaatatggt

SEQ ID NO: 6633 - RNA, 20 nt, synthetic construct
  misc_feature 1..20: note = spacer sequence
  source 1..20: mol_type = other RNA
gttttccaaactcagatcta

SEQ ID NO: 6634 - RNA, 20 nt, synthetic construct
  misc_feature 1..20: note = spacer sequence
  source 1..20: mol_type = other RNA
ttagttttaaaatggccaga

SEQ ID NO: 6635 - RNA, 20 nt, synthetic construct
  misc_feature 1..20: note = spacer sequence
  source 1..20: mol_type = other RNA
ggccattttaaaactaaaga

SEQ ID NO: 6636 - RNA, 20 nt, synthetic construct
  misc_feature 1..20: note = spacer sequence
  source 1..20: mol_type = other RNA
tgccaggattgggtttctca

SEQ ID NO: 6637 - RNA, 20 nt, synthetic construct
  misc_feature 1..20: note = spacer sequence
  source 1..20: mol_type = other RNA
tggcaagaaaatctggccat

SEQ ID NO: 6638 - RNA, 20 nt, synthetic construct
  misc_feature 1..20: note = spacer sequence
  source 1..20: mol_type = other RNA
cacttgttaaacagaacatt

SEQ ID NO: 6639 - RNA, 20 nt, synthetic construct
  misc_feature 1..20: note = spacer sequence
  source 1..20: mol_type = other RNA
cttgttaaacagaacatttt

SEQ ID NO: 6640 - RNA, 20 nt, synthetic construct
  misc_feature 1..20: note = spacer sequence
  source 1..20: mol_type = other RNA
gtttaacaagtgagaaaccc

SEQ ID NO: 6641 - RNA, 20 nt, synthetic construct
  misc_feature 1..20: note = spacer sequence
  source 1..20: mol_type = other RNA
caggttttaaacttaacaaa

SEQ ID NO: 6642 - RNA, 20 nt, synthetic construct
  misc_feature 1..20: note = spacer sequence
  source 1..20: mol_type = other RNA
atcccaggttttaaacttaa

SEQ ID NO: 6643 - RNA, 20 nt, synthetic construct
  misc_feature 1..20: note = spacer sequence
  source 1..20: mol_type = other RNA
tgttcattcatgttcattca

SEQ ID NO: 6644 - RNA, 20 nt, synthetic construct
  misc_feature 1..20: note = spacer sequence
  source 1..20: mol_type = other RNA
ttcatgttcattcaggactg

SEQ ID NO: 6645 - RNA, 20 nt, synthetic construct
  misc_feature 1..20: note = spacer sequence
  source 1..20: mol_type = other RNA
tgttcattcaggactgcagg

SEQ ID NO: 6646 - RNA, 20 nt, synthetic construct
  misc_feature 1..20: note = spacer sequence
  source 1..20: mol_type = other RNA
ttcaggactgcaggttatca

SEQ ID NO: 6647 - RNA, 20 nt, synthetic construct
  misc_feature 1..20: note = spacer sequence
  source 1..20: mol_type = other RNA
ggactgcaggttatcatgac

SEQ ID NO: 6648 - RNA, 20 nt, synthetic construct
  misc_feature 1..20: note = spacer sequence
  source 1..20: mol_type = other RNA
tgaatgaacatgaatgaaca

SEQ ID NO: 6649 - RNA, 20 nt, synthetic construct
  misc_feature 1..20: note = spacer sequence
  source 1..20: mol_type = other RNA
tgacttgtttaacttgtggg

SEQ ID NO: 6650 - RNA, 20 nt, synthetic construct
  misc_feature 1..20: note = spacer sequence
  source 1..20: mol_type = other RNA
tgataacctgcagtcctgaa

SEQ ID NO: 6651 - RNA, 20 nt, synthetic construct
  misc_feature 1..20: note = spacer sequence
  source 1..20: mol_type = other RNA
cacaagttaaacaagtcatg

SEQ ID NO: 6652 - RNA, 20 nt, synthetic construct
  misc_feature 1..20: note = spacer sequence
  source 1..20: mol_type = other RNA
caagttatcctggggaactg

SEQ ID NO: 6653 - RNA, 20 nt, synthetic construct
  misc_feature 1..20: note = spacer sequence
  source 1..20: mol_type = other RNA
tggggaactgcatctggttc

SEQ ID NO: 6654 - RNA, 20 nt, synthetic construct
  misc_feature 1..20: note = spacer sequence
  source 1..20: mol_type = other RNA
ccaggataacttgggacaac

SEQ ID NO: 6655 - RNA, 20 nt, synthetic construct
  misc_feature 1..20: note = spacer sequence
  source 1..20: mol_type = other RNA
ggttcttgcaaaacaccaag

SEQ ID NO: 6656 - RNA, 20 nt, synthetic construct
  misc_feature 1..20: note = spacer sequence
  source 1..20: mol_type = other RNA
tgcaaaacaccaagtagaca

SEQ ID NO: 6657 - RNA, 20 nt, synthetic construct
  misc_feature 1..20: note = spacer sequence
  source 1..20: mol_type = other RNA
acttggtgttttgcaagaac

SEQ ID NO: 6658 - RNA, 20 nt, synthetic construct
  misc_feature 1..20: note = spacer sequence
  source 1..20: mol_type = other RNA
cttttacctccccttgaggg

SEQ ID NO: 6659 - RNA, 20 nt, synthetic construct
  misc_feature 1..20: note = spacer sequence
  source 1..20: mol_type = other RNA
tttacctccccttgagggca

SEQ ID NO: 6660 - RNA, 20 nt, synthetic construct
  misc_feature 1..20: note = spacer sequence
  source 1..20: mol_type = other RNA
ccttgagggcattaacattc

SEQ ID NO: 6661 - RNA, 20 nt, synthetic construct
  misc_feature 1..20: note = spacer sequence
  source 1..20: mol_type = other RNA
aggggaggtaaaagagagcc

SEQ ID NO: 6662 - RNA, 20 nt, synthetic construct
  misc_feature 1..20: note = spacer sequence
  source 1..20: mol_type = other RNA
gtagtcacttccattcagtt

SEQ ID NO: 6663 - RNA, 20 nt, synthetic construct
  misc_feature 1..20: note = spacer sequence
  source 1..20: mol_type = other RNA
cttccattcagttaaccctt

SEQ ID NO: 6664 - RNA, 20 nt, synthetic construct
  misc_feature 1..20: note = spacer sequence
  source 1..20: mol_type = other RNA
attcagttaaccctttattt

SEQ ID NO: 6665 - RNA, 20 nt, synthetic construct
  misc_feature 1..20: note = spacer sequence
  source 1..20: mol_type = other RNA
gttaaccctttatttttatg

SEQ ID NO: 6666 - RNA, 20 nt, synthetic construct
  misc_feature 1..20: note = spacer sequence
  source 1..20: mol_type = other RNA
tgagccatagttgtaaagca

SEQ ID NO: 6667 - RNA, 20 nt, synthetic construct
  misc_feature 1..20: note = spacer sequence
  source 1..20: mol_type = other RNA
agaaaaaccataaaaataaa

SEQ ID NO: 6668 - RNA, 20 nt, synthetic construct
  misc_feature 1..20: note = spacer sequence
  source 1..20: mol_type = other RNA
gctttacaactatggctcaa

SEQ ID NO: 6669 - RNA, 20 nt, synthetic construct
  misc_feature 1..20: note = spacer sequence
  source 1..20: mol_type = other RNA
tttataaaggtttgttgaac

SEQ ID NO: 6670 - RNA, 20 nt, synthetic construct
  misc_feature 1..20: note = spacer sequence
  source 1..20: mol_type = other RNA
acaaacctttataaatgatt

SEQ ID NO: 6671 - RNA, 20 nt, synthetic construct
  misc_feature 1..20: note = spacer sequence
  source 1..20: mol_type = other RNA
aaatactgttgcttaaagta

SEQ ID NO: 6672 - RNA, 20 nt, synthetic construct
  misc_feature 1..20: note = spacer sequence
  source 1..20: mol_type = other RNA
taatactttaagcaacagta

SEQ ID NO: 6673 - RNA, 20 nt, synthetic construct
  misc_feature 1..20: note = spacer sequence
  source 1..20: mol_type = other RNA
taaaaaatcttaatacttta

SEQ ID NO: 6674 - RNA, 20 nt, synthetic construct
  misc_feature 1..20: note = spacer sequence
  source 1..20: mol_type = other RNA
ttcatttggcatgaaatttt

SEQ ID NO: 6675 - RNA, 20 nt, synthetic construct
  misc_feature 1..20: note = spacer sequence
  source 1..20: mol_type = other RNA
tttggcatgaaattttgagt

SEQ ID NO: 6676 - RNA, 20 nt, synthetic construct
  misc_feature 1..20: note = spacer sequence
  source 1..20: mol_type = other RNA
tgccaaatgaatgacgggcc

SEQ ID NO: 6677 - RNA, 20 nt, synthetic construct
  misc_feature 1..20: note = spacer sequence
  source 1..20: mol_type = other RNA
aaatttcatgccaaatgaat

SEQ ID NO: 6678 - RNA, 20 nt, synthetic construct
  misc_feature 1..20: note = spacer sequence
  source 1..20: mol_type = other RNA
ctttcactttcctttttttc

SEQ ID NO: 6679 - RNA, 20 nt, synthetic construct
  misc_feature 1..20: note = spacer sequence
  source 1..20: mol_type = other RNA
ctttcctttttttccaaagc

SEQ ID NO: 6680 - RNA, 20 nt, synthetic construct
  misc_feature 1..20: note = spacer sequence
  source 1..20: mol_type = other RNA
tttttttccaaagcaattaa

SEQ ID NO: 6681 - RNA, 20 nt, synthetic construct
  misc_feature 1..20: note = spacer sequence
  source 1..20: mol_type = other RNA
aaagcaattaaaaaaactgc

SEQ ID NO: 6682 - RNA, 20 nt, synthetic construct
  misc_feature 1..20: note = spacer sequence
  source 1..20: mol_type = other RNA
tactttggcagtttttttaa

SEQ ID NO: 6683 - RNA, 20 nt, synthetic construct
  misc_feature 1..20: note = spacer sequence
  source 1..20: mol_type = other RNA
ctcttactttggcagttttt

SEQ ID NO: 6684 - RNA, 20 nt, synthetic construct
  misc_feature 1..20: note = spacer sequence
  source 1..20: mol_type = other RNA
gcagtcactcttactttggc

SEQ ID NO: 6685 - RNA, 20 nt, synthetic construct
  misc_feature 1..20: note = spacer sequence
  source 1..20: mol_type = other RNA
atggtaagttacagtaacct

SEQ ID NO: 6686 - RNA, 20 nt, synthetic construct
  misc_feature 1..20: note = spacer sequence
  source 1..20: mol_type = other RNA
tccatggtaagttacagtaa

SEQ ID NO: 6687 - RNA, 20 nt, synthetic construct
  misc_feature 1..20: note = spacer sequence
  source 1..20: mol_type = other RNA
acaacatagttatttgggtt

SEQ ID NO: 6688 - RNA, 20 nt, synthetic construct
  misc_feature 1..20: note = spacer sequence
  source 1..20: mol_type = other RNA
tttagacagcaacacttacc

SEQ ID NO: 6689 - RNA, 20 nt, synthetic construct
  misc_feature 1..20: note = spacer sequence
  source 1..20: mol_type = other RNA
aaatgaaatactaaaaccca

SEQ ID NO: 6690 - RNA, 20 nt, synthetic construct
  misc_feature 1..20: note = spacer sequence
  source 1..20: mol_type = other RNA
ttgcaacaccaagaaaaagc

SEQ ID NO: 6691 - RNA, 20 nt, synthetic construct
  misc_feature 1..20: note = spacer sequence
  source 1..20: mol_type = other RNA
tggtgttgcaaagacattac

SEQ ID NO: 6692 - RNA, 20 nt, synthetic construct
  misc_feature 1..20: note = spacer sequence
  source 1..20: mol_type = other RNA
aagctttttcttggtgttgc

SEQ ID NO: 6693 - RNA, 20 nt, synthetic construct
  misc_feature 1..20: note = spacer sequence
  source 1..20: mol_type = other RNA
acttttaaactactaaatat

SEQ ID NO: 6694 - RNA, 20 nt, synthetic construct
  misc_feature 1..20: note = spacer sequence
  source 1..20: mol_type = other RNA
ctctactaggattaatgtta

SEQ ID NO: 6695 - RNA, 20 nt, synthetic construct
  misc_feature 1..20: note = spacer sequence
  source 1..20: mol_type = other RNA
ctactaggattaatgttatt

SEQ ID NO: 6696 - RNA, 20 nt, synthetic construct
  misc_feature 1..20: note = spacer sequence
  source 1..20: mol_type = other RNA
actaggattaatgttatttt

SEQ ID NO: 6697 - RNA, 20 nt, synthetic construct
  misc_feature 1..20: note = spacer sequence
  source 1..20: mol_type = other RNA
tagtagagagatatactaat

SEQ ID NO: 6698 - RNA, 20 nt, synthetic construct
  misc_feature 1..20: note = spacer sequence
  source 1..20: mol_type = other RNA
aatattatgaggttcttaaa

SEQ ID NO: 6699 - RNA, 20 nt, synthetic construct
  misc_feature 1..20: note = spacer sequence
  source 1..20: mol_type = other RNA
taatattagaaaaataacat

SEQ ID NO: 6700 - RNA, 20 nt, synthetic construct
  misc_feature 1..20: note = spacer sequence
  source 1..20: mol_type = other RNA
taaacatcttttgggtattg

SEQ ID NO: 6701 - RNA, 20 nt, synthetic construct
  misc_feature 1..20: note = spacer sequence
  source 1..20: mol_type = other RNA
tttgggtattgttgggagga

SEQ ID NO: 6702 - RNA, 20 nt, synthetic construct
  misc_feature 1..20: note = spacer sequence
  source 1..20: mol_type = other RNA
caacaatacccaaaagatgt

SEQ ID NO: 6703 - RNA, 20 nt, synthetic construct
  misc_feature 1..20: note = spacer sequence
  source 1..20: mol_type = other RNA
tcccaacaatacccaaaaga

SEQ ID NO: 6704 - RNA, 20 nt, synthetic construct
  misc_feature 1..20: note = spacer sequence
  source 1..20: mol_type = other RNA
ctacctcctcccaacaatac

SEQ ID NO: 6705 - RNA, 20 nt, synthetic construct
  misc_feature 1..20: note = spacer sequence
  source 1..20: mol_type = other RNA
agtaatcactacctcctccc

SEQ ID NO: 6706 - RNA, 20 nt, synthetic construct
  misc_feature 1..20: note = spacer sequence
  source 1..20: mol_type = other RNA
tcttaaaattttttacaggt

SEQ ID NO: 6707 - RNA, 20 nt, synthetic construct
  misc_feature 1..20: note = spacer sequence
  source 1..20: mol_type = other RNA
taaaattttttacaggtcca

SEQ ID NO: 6708 - RNA, 20 nt, synthetic construct
  misc_feature 1..20: note = spacer sequence
  source 1..20: mol_type = other RNA
atgaaaaagcagatgacttg

SEQ ID NO: 6709 - RNA, 20 nt, synthetic construct
  misc_feature 1..20: note = spacer sequence
  source 1..20: mol_type = other RNA
tggacctgtaaaaaatttta

SEQ ID NO: 6710 - RNA, 20 nt, synthetic construct
  misc_feature 1..20: note = spacer sequence
  source 1..20: mol_type = other RNA
gctttttcatggacctgtaa

SEQ ID NO: 6711 - RNA, 20 nt, synthetic construct
  misc_feature 1..20: note = spacer sequence
  source 1..20: mol_type = other RNA
tctgctttttcatggacctg

SEQ ID NO: 6712 - RNA, 20 nt, synthetic construct
  misc_feature 1..20: note = spacer sequence
  source 1..20: mol_type = other RNA
acctttgcccaagtcatctg

SEQ ID NO: 6713 - RNA, 20 nt, synthetic construct
  misc_feature 1..20: note = spacer sequence
  source 1..20: mol_type = other RNA
tttccacctttgcccaagtc

SEQ ID NO: 6714 - RNA, 20 nt, synthetic construct
  misc_feature 1..20: note = spacer sequence
  source 1..20: mol_type = other RNA
tcatttccacctttgcccaa

SEQ ID NO: 6715 - RNA, 20 nt, synthetic construct
  misc_feature 1..20: note = spacer sequence
  source 1..20: mol_type = other RNA
ttgtactttcttcatttcca

SEQ ID NO: 6716 - RNA, 20 nt, synthetic construct
  misc_feature 1..20: note = spacer sequence
  source 1..20: mol_type = other RNA
tgtctttgtactttcttcat

SEQ ID NO: 6717 - RNA, 20 nt, synthetic construct
  misc_feature 1..20: note = spacer sequence
  source 1..20: mol_type = other RNA
agcgtttcctgtctttgtac

SEQ ID NO: 6718 - RNA, 20 nt, synthetic construct
  misc_feature 1..20: note = spacer sequence
  source 1..20: mol_type = other RNA
tttggcttgtggtgtaattg

SEQ ID NO: 6719 - RNA, 20 nt, synthetic construct
  misc_feature 1..20: note = spacer sequence
  source 1..20: mol_type = other RNA
caattacaccacaagccaaa

SEQ ID NO: 6720 - RNA, 20 nt, synthetic construct
  misc_feature 1..20: note = spacer sequence
  source 1..20: mol_type = other RNA
cccaataaacattcccttgg

SEQ ID NO: 6721 - RNA, 20 nt, synthetic construct
  misc_feature 1..20: note = spacer sequence
  source 1..20: mol_type = other RNA
cttggatgtagtctgaggcc

SEQ ID NO: 6722 - RNA, 20 nt, synthetic construct
  misc_feature 1..20: note = spacer sequence
  source 1..20: mol_type = other RNA
aagggaatgtttattgggcg

SEQ ID NO: 6723 - RNA, 20 nt, synthetic construct
  misc_feature 1..20: note = spacer sequence
  source 1..20: mol_type = other RNA
gaggccccttaactcatctg

SEQ ID NO: 6724 - RNA, 20 nt, synthetic construct
  misc_feature 1..20: note = spacer sequence
  source 1..20: mol_type = other RNA
gactacatccaagggaatgt

SEQ ID NO: 6725 - RNA, 20 nt, synthetic construct
  misc_feature 1..20: note = spacer sequence
  source 1..20: mol_type = other RNA
tctgttatcctgctagctgt

SEQ ID NO: 6726 - RNA, 20 nt, synthetic construct
  misc_feature 1..20: note = spacer sequence
  source 1..20: mol_type = other RNA
gttatcctgctagctgtaga

SEQ ID NO: 6727 - RNA, 20 nt, synthetic construct
  misc_feature 1..20: note = spacer sequence
  source 1..20: mol_type = other RNA
tgctagctgtagaaatgtat

SEQ ID NO: 6728 - RNA, 20 nt, synthetic construct
  misc_feature 1..20: note = spacer sequence
  source 1..20: mol_type = other RNA
acagctagcaggataacaga

SEQ ID NO: 6729 - RNA, 20 nt, synthetic construct
  misc_feature 1..20: note = spacer sequence
  source 1..20: mol_type = other RNA
tgataaacattaaacactgt

SEQ ID NO: 6730 - RNA, 20 nt, synthetic construct
  misc_feature 1..20: note = spacer sequence
  source 1..20: mol_type = other RNA
ggatacatttctacagctag

SEQ ID NO: 6731 - RNA, 20 nt, synthetic construct
  misc_feature 1..20: note = spacer sequence
  source 1..20: mol_type = other RNA
taaaagtgtaattgtgtgac

SEQ ID NO: 6732 - RNA, 20 nt, synthetic construct
  misc_feature 1..20: note = spacer sequence
  source 1..20: mol_type = other RNA
cacaattacacttttaagat

SEQ ID NO: 6733 - RNA, 20 nt, synthetic construct
  misc_feature 1..20: note = spacer sequence
  source 1..20: mol_type = other RNA
gagttgctttaaagtacctg

SEQ ID NO: 6734 - RNA, 20 nt, synthetic construct
  misc_feature 1..20: note = spacer sequence
  source 1..20: mol_type = other RNA
gaaaaagtcacacaattaca

SEQ ID NO: 6735 - RNA, 20 nt, synthetic construct
  misc_feature 1..20: note = spacer sequence
  source 1..20: mol_type = other RNA
ctacaggtactttaaagcaa

SEQ ID NO: 6736 - RNA, 20 nt, synthetic construct
  misc_feature 1..20: note = spacer sequence
  source 1..20: mol_type = other RNA
cactacaggtactttaaagc

SEQ ID NO: 6737 - RNA, 20 nt, synthetic construct
  misc_feature 1..20: note = spacer sequence
  source 1..20: mol_type = other RNA
gtttctcactacaggtactt

SEQ ID NO: 6738 - RNA, 20 nt, synthetic construct
  misc_feature 1..20: note = spacer sequence
  source 1..20: mol_type = other RNA
taaatcagtttctcactaca

SEQ ID NO: 6739 - RNA, 20 nt, synthetic construct
  misc_feature 1..20: note = spacer sequence
  source 1..20: mol_type = other RNA
cttggaagatttgtatagtt

SEQ ID NO: 6740 - RNA, 20 nt, synthetic construct
  misc_feature 1..20: note = spacer sequence
  source 1..20: mol_type = other RNA
aagtgatcataaatcagttt

SEQ ID NO: 6741 - RNA, 20 nt, synthetic construct
  misc_feature 1..20: note = spacer sequence
  source 1..20: mol_type = other RNA
tccaagtgatcataaatcag

SEQ ID NO: 6742 - RNA, 20 nt, synthetic construct
  misc_feature 1..20: note = spacer sequence
  source 1..20: mol_type = other RNA
gttaaaatgtctgtttcaat

SEQ ID NO: 6743 - RNA, 20 nt, synthetic construct
  misc_feature 1..20: note = spacer sequence
  source 1..20: mol_type = other RNA
gtttcaatgacctgtatttt

SEQ ID NO: 6744 - RNA, 20 nt, synthetic construct
  misc_feature 1..20: note = spacer sequence
  source 1..20: mol_type = other RNA
atgacctgtattttgccaga

SEQ ID NO: 6745 - RNA, 20 nt, synthetic construct
  misc_feature 1..20: note = spacer sequence
  source 1..20: mol_type = other RNA
ttgaaacagacattttaact

SEQ ID NO: 6746 - RNA, 20 nt, synthetic construct
  misc_feature 1..20: note = spacer sequence
  source 1..20: mol_type = other RNA
ggcaaaatacaggtcattga

SEQ ID NO: 6747 - RNA, 20 nt, synthetic construct
  misc_feature 1..20: note = spacer sequence
  source 1..20: mol_type = other RNA
cagatgggtattaaacttgt

SEQ ID NO: 6748 - RNA, 20 nt, synthetic construct
  misc_feature 1..20: note = spacer sequence
  source 1..20: mol_type = other RNA
gtgatttaagtctggcaaaa

SEQ ID NO: 6749 - RNA, 20 nt, synthetic construct
  misc_feature 1..20: note = spacer sequence
  source 1..20: mol_type = other RNA
gaatttctttgtcattcaag

SEQ ID NO: 6750 - RNA, 20 nt, synthetic construct
  misc_feature 1..20: note = spacer sequence
  source 1..20: mol_type = other RNA
gacaagtttaatacccatct

SEQ ID NO: 6751 - RNA, 20 nt, synthetic construct
  misc_feature 1..20: note = spacer sequence
  source 1..20: mol_type = other RNA
ttgtcattcaagcctgtgaa

SEQ ID NO: 6752 - RNA, 20 nt, synthetic construct
  misc_feature 1..20: note = spacer sequence
  source 1..20: mol_type = other RNA
ttcaagcctgtgaataaaaa

SEQ ID NO: 6753 - RNA, 20 nt, synthetic construct
  misc_feature 1..20: note = spacer sequence
  source 1..20: mol_type = other RNA
agcctgtgaataaaaaccct

SEQ ID NO: 6754 - RNA, 20 nt, synthetic construct
  misc_feature 1..20: note = spacer sequence
  source 1..20: mol_type = other RNA
caggcttgaatgacaaagaa

SEQ ID NO: 6755 - RNA, 20 nt, synthetic construct
  misc_feature 1..20: note = spacer sequence
  source 1..20: mol_type = other RNA
taataagtgccatacagggt

SEQ ID NO: 6756 - RNA, 20 nt, synthetic construct
  misc_feature 1..20: note = spacer sequence
  source 1..20: mol_type = other RNA
tttaatagcctcataataag

SEQ ID NO: 6757 - RNA, 20 nt, synthetic construct
  misc_feature 1..20: note = spacer sequence
  source 1..20: mol_type = other RNA
aaattcaaactaaattagct

SEQ ID NO: 6758 - RNA, 20 nt, synthetic construct
  misc_feature 1..20: note = spacer sequence
  source 1..20: mol_type = other RNA
aactaaattagctctgatac

SEQ ID NO: 6759 - RNA, 20 nt, synthetic construct
  misc_feature 1..20: note = spacer sequence
  source 1..20: mol_type = other RNA
gatacttatttatataaaca

SEQ ID NO: 6760 - RNA, 20 nt, synthetic construct
  misc_feature 1..20: note = spacer sequence
  source 1..20: mol_type = other RNA
gagctaatttagtttgaatt

SEQ ID NO: 6761 - RNA, 20 nt, synthetic construct
  misc_feature 1..20: note = spacer sequence
  source 1..20: mol_type = other RNA
gtggaacagatttagtaata

SEQ ID NO: 6762 - RNA, 20 nt, synthetic construct
  misc_feature 1..20: note = spacer sequence
  source 1..20: mol_type = other RNA
actgaagctgtttatataaa

SEQ ID NO: 6763 - RNA, 20 nt, synthetic construct
  misc_feature 1..20: note = spacer sequence
  source 1..20: mol_type = other RNA
gttccactgaagctgtttat

SEQ ID NO: 6764 - RNA, 20 nt, synthetic construct
  misc_feature 1..20: note = spacer sequence
  source 1..20: mol_type = other RNA
ctgttagtattactaaatct

SEQ ID NO: 6765 - RNA, 20 nt, synthetic construct
  misc_feature 1..20: note = spacer sequence
  source 1..20: mol_type = other RNA
aaataaaatgctatcactgt

SEQ ID NO: 6766 - RNA, 20 nt, synthetic construct
  misc_feature 1..20: note = spacer sequence
  source 1..20: mol_type = other RNA
aaacactttcaaaataaaat

SEQ ID NO: 6767 - RNA, 20 nt, synthetic construct
  misc_feature 1..20: note = spacer sequence
  source 1..20: mol_type = other RNA
caaaacactttcaaaataaa

SEQ ID NO: 6768 - RNA, 20 nt, synthetic construct
  misc_feature 1..20: note = spacer sequence
  source 1..20: mol_type = other RNA
aaatgcatactttaaaacag

SEQ ID NO: 6769 - RNA, 20 nt, synthetic construct
  misc_feature 1..20: note = spacer sequence
  source 1..20: mol_type = other RNA
tttagctaaaactaacacaa

SEQ ID NO: 6770 - RNA, 20 nt, synthetic construct
  misc_feature 1..20: note = spacer sequence
  source 1..20: mol_type = other RNA
gcttagacaaataggctgtc

SEQ ID NO: 6771 - RNA, 20 nt, synthetic construct
  misc_feature 1..20: note = spacer sequence
  source 1..20: mol_type = other RNA
aagcagagttgtgttagttt

SEQ ID NO: 6772 - RNA, 20 nt, synthetic construct
  misc_feature 1..20: note = spacer sequence
  source 1..20: mol_type = other RNA
tttgaaagctttagggaaat

SEQ ID NO: 6773 - RNA, 20 nt, synthetic construct
  misc_feature 1..20: note = spacer sequence
  source 1..20: mol_type = other RNA
aaggacagcctatttgtcta

SEQ ID NO: 6774 - RNA, 20 nt, synthetic construct
  misc_feature 1..20: note = spacer sequence
  source 1..20: mol_type = other RNA
ctaaagctttcaaaggacag

SEQ ID NO: 6775 - RNA, 20 nt, synthetic construct
  misc_feature 1..20: note = spacer sequence
  source 1..20: mol_type = other RNA
tgcttagtcattttagcatt

SEQ ID NO: 6776 - RNA, 20 nt, synthetic construct
  misc_feature 1..20: note = spacer sequence
  source 1..20: mol_type = other RNA
ttttagcattttgattcata

SEQ ID NO: 6777 - RNA, 20 nt, synthetic construct
  misc_feature 1..20: note = spacer sequence
  source 1..20: mol_type = other RNA
aaatgctaaaatgactaagc

SEQ ID NO: 6778 - RNA, 20 nt, synthetic construct
  misc_feature 1..20: note = spacer sequence
  source 1..20: mol_type = other RNA
taaagtacctcctcatttta

SEQ ID NO: 6779 - RNA, 20 nt, synthetic construct
  misc_feature 1..20: note = spacer sequence
  source 1..20: mol_type = other RNA
tcattttaaaaagacattat

SEQ ID NO: 6780 - RNA, 20 nt, synthetic construct
  misc_feature 1..20: note = spacer sequence
  source 1..20: mol_type = other RNA
ttttaaaaagacattatgat

SEQ ID NO: 6781 - RNA, 20 nt, synthetic construct
  misc_feature 1..20: note = spacer sequence
  source 1..20: mol_type = other RNA
ttttaaaatgaggaggtact

SEQ ID NO: 6782 - RNA, 20 nt, synthetic construct
  misc_feature 1..20: note = spacer sequence
  source 1..20: mol_type = other RNA
taatgtctttttaaaatgag

SEQ ID NO: 6783 - RNA, 20 nt, synthetic construct
  misc_feature 1..20: note = spacer sequence
  source 1..20: mol_type = other RNA
tacatcataatgtcttttta

SEQ ID NO: 6784 - RNA, 20 nt, synthetic construct
  misc_feature 1..20: note = spacer sequence
  source 1..20: mol_type = other RNA
cttacatcataatgtctttt

SEQ ID NO: 6785 - RNA, 20 nt, synthetic construct
  misc_feature 1..20: note = spacer sequence
  source 1..20: mol_type = other RNA
aatggctctcttacatcata

SEQ ID NO: 6786 - RNA, 20 nt, synthetic construct
  misc_feature 1..20: note = spacer sequence
  source 1..20: mol_type = other RNA
ctaaaaagttatcaaatggc

SEQ ID NO: 6787 - RNA, 20 nt, synthetic construct
  misc_feature 1..20: note = spacer sequence
  source 1..20: mol_type = other RNA
aagctcactaaaaagttatc

SEQ ID NO: 6788 - RNA, 20 nt, synthetic construct
  misc_feature 1..20: note = spacer sequence
  source 1..20: mol_type = other RNA
gctagctagtaagattatct

SEQ ID NO: 6789 - RNA, 20 nt, synthetic construct
  misc_feature 1..20: note = spacer sequence
  source 1..20: mol_type = other RNA
tactagctagctgaggctgt

SEQ ID NO: 6790 - RNA, 20 nt, synthetic construct
  misc_feature 1..20: note = spacer sequence
  source 1..20: mol_type = other RNA
acctgccagaatggcacaaa

SEQ ID NO: 6791 - RNA, 20 nt, synthetic construct
  misc_feature 1..20: note = spacer sequence
  source 1..20: mol_type = other RNA
ggcaggtagataatcttact

SEQ ID NO: 6792 - RNA, 20 nt, synthetic construct
  misc_feature 1..20: note = spacer sequence
  source 1..20: mol_type = other RNA
acattcaagggtagacgctg

SEQ ID NO: 6793 - RNA, 20 nt, synthetic construct
  misc_feature 1..20: note = spacer sequence
  source 1..20: mol_type = other RNA
agggtagacgctggcacaac

SEQ ID NO: 6794 - RNA, 20 nt, synthetic construct
  misc_feature 1..20: note = spacer sequence
  source 1..20: mol_type = other RNA
acccttgaatgtagaatttg

SEQ ID NO: 6795 - RNA, 20 nt, synthetic construct
  misc_feature 1..20: note = spacer sequence
  source 1..20: mol_type = other RNA
gtaagtaggttgtgccagcg

SEQ ID NO: 6796 - RNA, 20 nt, synthetic construct
  misc_feature 1..20: note = spacer sequence
  source 1..20: mol_type = other RNA
gtagcattagaagatggaac

SEQ ID NO: 6797 - RNA, 20 nt, synthetic construct
  misc_feature 1..20: note = spacer sequence
  source 1..20: mol_type = other RNA
aatgctacagattgctttaa

SEQ ID NO: 6798 - RNA, 20 nt, synthetic construct
  misc_feature 1..20: note = spacer sequence
  source 1..20: mol_type = other RNA
tctaatgctacagattgctt

SEQ ID NO: 6799 - RNA, 20 nt, synthetic construct
  misc_feature 1..20: note = spacer sequence
  source 1..20: mol_type = other RNA
atcttctaatgctacagatt

SEQ ID NO: 6800 - RNA, 20 nt, synthetic construct
  misc_feature 1..20: note = spacer sequence
  source 1..20: mol_type = other RNA
ttggttccatcttctaatgc

SEQ ID NO: 6801 - RNA, 20 nt, synthetic construct
  misc_feature 1..20: note = spacer sequence
  source 1..20: mol_type = other RNA
aacatttccttggttccatc

SEQ ID NO: 6802 - RNA, 20 nt, synthetic construct
  misc_feature 1..20: note = spacer sequence
  source 1..20: mol_type = other RNA
ggctgttgagaaataattta

SEQ ID NO: 6803 - RNA, 20 nt, synthetic construct
  misc_feature 1..20: note = spacer sequence
  source 1..20: mol_type = other RNA
acagccagaacccacagtca

SEQ ID NO: 6804 - RNA, 20 nt, synthetic construct
  misc_feature 1..20: note = spacer sequence
  source 1..20: mol_type = other RNA
caacagccagaacccacagt

SEQ ID NO: 6805 - RNA, 20 nt, synthetic construct
  misc_feature 1..20: note = spacer sequence
  source 1..20: mol_type = other RNA
gtgtgtaaattatttctcaa

SEQ ID NO: 6806 - RNA, 20 nt, synthetic construct
  misc_feature 1..20: note = spacer sequence
  source 1..20: mol_type = other RNA
ctaattcggtgtgtaaatta

SEQ ID NO: 6807 - RNA, 20 nt, synthetic construct
  misc_feature 1..20: note = spacer sequence
  source 1..20: mol_type = other RNA
tttcactaattcggtgtgta

SEQ ID NO: 6808 - RNA, 20 nt, synthetic construct
  misc_feature 1..20: note = spacer sequence
  source 1..20: mol_type = other RNA
ctttctcttaatgtatttat

SEQ ID NO: 6809 - RNA, 20 nt, synthetic construct
  misc_feature 1..20: note = spacer sequence
  source 1..20: mol_type = other RNA
cttaatgtatttatgtacct

SEQ ID NO: 6810 - RNA, 20 nt, synthetic construct
  misc_feature 1..20: note = spacer sequence
  source 1..20: mol_type = other RNA
taatgtatttatgtacctga

SEQ ID NO: 6811 - RNA, 20 nt, synthetic construct
  misc_feature 1..20: note = spacer sequence
  source 1..20: mol_type = other RNA
ggtacataaatacattaaga

SEQ ID NO: 6812 - RNA, 20 nt, synthetic construct
  misc_feature 1..20: note = spacer sequence
  source 1..20: mol_type = other RNA
caggtacataaatacattaa

SEQ ID NO: 6813 - RNA, 20 nt, synthetic construct
  misc_feature 1..20: note = spacer sequence
  source 1..20: mol_type = other RNA
ctcaggtacataaatacatt

SEQ ID NO: 6814 - RNA, 20 nt, synthetic construct
  misc_feature 1..20: note = spacer sequence
  source 1..20: mol_type = other RNA
atgttaacctaactcaggtt

SEQ ID NO: 6815 - RNA, 20 nt, synthetic construct
  misc_feature 1..20: note = spacer sequence
  source 1..20: mol_type = other RNA
ggtttgactaaattattcaa

SEQ ID NO: 6816 - RNA, 20 nt, synthetic construct
  misc_feature 1..20: note = spacer sequence
  source 1..20: mol_type = other RNA
aacctgagttaggttaacat

SEQ ID NO: 6817 - RNA, 20 nt, synthetic construct
  misc_feature 1..20: note = spacer sequence
  source 1..20: mol_type = other RNA
attggaaattgtagaatatt

SEQ ID NO: 6818 - RNA, 20 nt, synthetic construct
  misc_feature 1..20: note = spacer sequence
  source 1..20: mol_type = other RNA
aattgaataatttagtcaaa

SEQ ID NO: 6819 - RNA, 20 nt, synthetic construct
  misc_feature 1..20: note = spacer sequence
  source 1..20: mol_type = other RNA
acaatttccaattgaataat

SEQ ID NO: 6820 - RNA, 20 nt, synthetic construct
  misc_feature 1..20: note = spacer sequence
  source 1..20: mol_type = other RNA
gataaaccagaaataagtga

SEQ ID NO: 6821 - RNA, 20 nt, synthetic construct
  misc_feature 1..20: note = spacer sequence
  source 1..20: mol_type = other RNA
gaaataatattctacaattt

SEQ ID NO: 6822 - RNA, 20 nt, synthetic construct
  misc_feature 1..20: note = spacer sequence
  source 1..20: mol_type = other RNA
ggtttatcagaaataatatt

SEQ ID NO: 6823 - RNA, 20 nt, synthetic construct
  misc_feature 1..20: note = spacer sequence
  source 1..20: mol_type = other RNA
cttatttctggtttatcaga

SEQ ID NO: 6824 - RNA, 20 nt, synthetic construct
  misc_feature 1..20: note = spacer sequence
  source 1..20: mol_type = other RNA
taaatatgtactttatcaaa

SEQ ID NO: 6825 - RNA, 20 nt, synthetic construct
  misc_feature 1..20: note = spacer sequence
  source 1..20: mol_type = other RNA
aatgtaggagagatcattta

SEQ ID NO: 6826 - RNA, 20 nt, synthetic construct
  misc_feature 1..20: note = spacer sequence
  source 1..20: mol_type = other RNA
tacatttgataaagtacata

SEQ ID NO: 6827 - RNA, 20 nt, synthetic construct
  misc_feature 1..20: note = spacer sequence
  source 1..20: mol_type = other RNA
cctacatttgataaagtaca

SEQ ID NO: 6828 - RNA, 20 nt, synthetic construct
  misc_feature 1..20: note = spacer sequence
  source 1..20: mol_type = other RNA
ctcctacatttgataaagta

SEQ ID NO: 6829 - RNA, 20 nt, synthetic construct
  misc_feature 1..20: note = spacer sequence
  source 1..20: mol_type = other RNA
tttaggagaggaaaagctaa

SEQ ID NO: 6830 - RNA, 20 nt, synthetic construct
  misc_feature 1..20: note = spacer sequence
  source 1..20: mol_type = other RNA
taaatgatctctcctacatt

SEQ ID NO: 6831 - RNA, 20 nt, synthetic construct
  misc_feature 1..20: note = spacer sequence
  source 1..20: mol_type = other RNA
cctaaatgatctctcctaca

SEQ ID NO: 6832 - RNA, 20 nt, synthetic construct
  misc_feature 1..20: note = spacer sequence
  source 1..20: mol_type = other RNA
tctcctaaatgatctctcct

SEQ ID NO: 6833 - RNA, 20 nt, synthetic construct
  misc_feature 1..20: note = spacer sequence
  source 1..20: mol_type = other RNA
aatttagcttttcctctcct

SEQ ID NO: 6834 - RNA, 20 nt, synthetic construct
  misc_feature 1..20: note = spacer sequence
  source 1..20: mol_type = other RNA
tccaatttagcttttcctct

SEQ ID NO: 6835 - RNA, 20 nt, synthetic construct
  misc_feature 1..20: note = spacer sequence
  source 1..20: mol_type = other RNA
gtagtgtttccaaagtttta

SEQ ID NO: 6836 - RNA, 20 nt, synthetic construct
  misc_feature 1..20: note = spacer sequence
  source 1..20: mol_type = other RNA
aaagttttaaaattatggta

SEQ ID NO: 6837 - RNA, 20 nt, synthetic construct
  misc_feature 1..20: note = spacer sequence
  source 1..20: mol_type = other RNA
cagtaagtggttaaaacaac

SEQ ID NO: 6838 - RNA, 20 nt, synthetic construct
  misc_feature 1..20: note = spacer sequence
  source 1..20: mol_type = other RNA
ttaaatctcagtagagaatt

SEQ ID NO: 6839 - RNA, 20 nt, synthetic construct
  misc_feature 1..20: note = spacer sequence
  source 1..20: mol_type = other RNA
cagtagagaatttttaaaaa

SEQ ID NO: 6840 - RNA, 20 nt, synthetic construct
  misc_feature 1..20: note = spacer sequence
  source 1..20: mol_type = other RNA
gtagagaatttttaaaaagc

SEQ ID NO: 6841 - RNA, 20 nt, synthetic construct
  misc_feature 1..20: note = spacer sequence
  source 1..20: mol_type = other RNA
actgagatttaaagaatggt

SEQ ID NO: 6842 - RNA, 20 nt, synthetic construct
  misc_feature 1..20: note = spacer sequence
  source 1..20: mol_type = other RNA
ctactgagatttaaagaatg

SEQ ID NO: 6843 - RNA, 20 nt, synthetic construct
  misc_feature 1..20: note = spacer sequence
  source 1..20: mol_type = other RNA
ctaatgtagtttgttgccta

SEQ ID NO: 6844 - RNA, 20 nt, synthetic construct
  misc_feature 1..20: note = spacer sequence
  source 1..20: mol_type = other RNA
acataggcaacaaactacat

SEQ ID NO: 6845 - RNA, 20 nt, synthetic construct
  misc_feature 1..20: note = spacer sequence
  source 1..20: mol_type = other RNA
attagagactcacttatgcc

SEQ ID NO: 6846 - RNA, 20 nt, synthetic construct
  misc_feature 1..20: note = spacer sequence
  source 1..20: mol_type = other RNA
aattgagttattccacatag

SEQ ID NO: 6847 - RNA, 20 nt, synthetic construct
  misc_feature 1..20: note = spacer sequence
  source 1..20: mol_type = other RNA
ctaattgagttattccacat

SEQ ID NO: 6848 - RNA, 20 nt, synthetic construct
  misc_feature 1..20: note = spacer sequence
  source 1..20: mol_type = other RNA
cttatgccttttgaaacttc

SEQ ID NO: 6849 - RNA, 20 nt, synthetic construct
  misc_feature 1..20: note = spacer sequence
  source 1..20: mol_type = other RNA
aaaggcataagtgagtctct

SEQ ID NO: 6850 - RNA, 20 nt, synthetic construct
  misc_feature 1..20: note = spacer sequence
  source 1..20: mol_type = other RNA
aatataattacactaccagt

SEQ ID NO: 6851 - RNA, 20 nt, synthetic construct
  misc_feature 1..20: note = spacer sequence
  source 1..20: mol_type = other RNA
tatatgcacatgtaaaaact

SEQ ID NO: 6852 - RNA, 20 nt, synthetic construct
  misc_feature 1..20: note = spacer sequence
  source 1..20: mol_type = other RNA
caatactttaaattggaaat

SEQ ID NO: 6853 - RNA, 20 nt, synthetic construct
  misc_feature 1..20: note = spacer sequence
  source 1..20: mol_type = other RNA
aatttaaagtattgggacca

SEQ ID NO: 6854 - RNA, 20 nt, synthetic construct
  misc_feature 1..20: note = spacer sequence
  source 1..20: mol_type = other RNA
ttcaagtctggatgttgggt

SEQ ID NO: 6855 - RNA, 20 nt, synthetic construct
  misc_feature 1..20: note = spacer sequence
  source 1..20: mol_type = other RNA
agtctggatgttgggtaatc

SEQ ID NO: 6856 - RNA, 20 nt, synthetic construct
  misc_feature 1..20: note = spacer sequence
  source 1..20: mol_type = other RNA
ggatgttgggtaatcacgtt

SEQ ID NO: 6857 - RNA, 20 nt, synthetic construct
  misc_feature 1..20: note = spacer sequence
  source 1..20: mol_type = other RNA
agacttgaaggacttacagc

SEQ ID NO: 6858 - RNA, 20 nt, synthetic construct
  misc_feature 1..20: note = spacer sequence
  source 1..20: mol_type = other RNA
cgttttcttccagaagccat

SEQ ID NO: 6859 - RNA, 20 nt, synthetic construct
  misc_feature 1..20: note = spacer sequence
  source 1..20: mol_type = other RNA
tccagaagccatttgttagg

SEQ ID NO: 6860 - RNA, 20 nt, synthetic construct
  misc_feature 1..20: note = spacer sequence
  source 1..20: mol_type = other RNA
agaagccatttgttaggact

SEQ ID NO: 6861 - RNA, 20 nt, synthetic construct
  misc_feature 1..20: note = spacer sequence
  source 1..20: mol_type = other RNA
ggaagaaaacgtgattaccc

SEQ ID NO: 6862 - RNA, 20 nt, synthetic construct
  misc_feature 1..20: note = spacer sequence
  source 1..20: mol_type = other RNA
taacaaatggcttctggaag

SEQ ID NO: 6863 - RNA, 20 nt, synthetic construct
  misc_feature 1..20: note = spacer sequence
  source 1..20: mol_type = other RNA
cagtgggccagtgtaaaatt

SEQ ID NO: 6864 - RNA, 20 nt, synthetic construct
  misc_feature 1..20: note = spacer sequence
  source 1..20: mol_type = other RNA
gtgggccagtgtaaaattaa

SEQ ID NO: 6865 - RNA, 20 nt, synthetic construct
  misc_feature 1..20: note = spacer sequence
  source 1..20: mol_type = other RNA
ttaattttacactggcccac

SEQ ID NO: 6866 - RNA, 20 nt, synthetic construct
  misc_feature 1..20: note = spacer sequence
  source 1..20: mol_type = other RNA
gtaaatttaaattataaaac

SEQ ID NO: 6867 - RNA, 20 nt, synthetic construct
  misc_feature 1..20: note = spacer sequence
  source 1..20: mol_type = other RNA
ctcattttctaaaggcagga

SEQ ID NO: 6868 - RNA, 20 nt, synthetic construct
  misc_feature 1..20: note = spacer sequence
  source 1..20: mol_type = other RNA
cattttctaaaggcaggaat

SEQ ID NO: 6869 - RNA, 20 nt, synthetic construct
  misc_feature 1..20: note = spacer sequence
  source 1..20: mol_type = other RNA
ttttctaaaggcaggaatat

SEQ ID NO: 6870 - RNA, 20 nt, synthetic construct
  misc_feature 1..20: note = spacer sequence
  source 1..20: mol_type = other RNA
aaaggcaggaatataaggac

SEQ ID NO: 6871 - RNA, 20 nt, synthetic construct
  misc_feature 1..20: note = spacer sequence
  source 1..20: mol_type = other RNA
tgcctttagaaaatgagaga

SEQ ID NO: 6872 - RNA, 20 nt, synthetic construct
  misc_feature 1..20: note = spacer sequence
  source 1..20: mol_type = other RNA
ttatattcctgcctttagaa

SEQ ID NO: 6873 - RNA, 20 nt, synthetic construct
  misc_feature 1..20: note = spacer sequence
  source 1..20: mol_type = other RNA
agggcaatgtccttatattc

SEQ ID NO: 6874 - RNA, 20 nt, synthetic construct
  misc_feature 1..20: note = spacer sequence
  source 1..20: mol_type = other RNA
ccccatcaaaccaaaggtct

SEQ ID NO: 6875 - RNA, 20 nt, synthetic construct
  misc_feature 1..20: note = spacer sequence
  source 1..20: mol_type = other RNA
ccatcaaaccaaaggtcttg

SEQ ID NO: 6876 - RNA, 20 nt, synthetic construct
  misc_feature 1..20: note = spacer sequence
  source 1..20: mol_type = other RNA
aaccaaaggtcttgctgctg

SEQ ID NO: 6877 - RNA, 20 nt, synthetic construct
  misc_feature 1..20: note = spacer sequence
  source 1..20: mol_type = other RNA
tgctgctgagtattatttaa

SEQ ID NO: 6878 - RNA, 20 nt, synthetic construct
  misc_feature 1..20: note = spacer sequence
  source 1..20: mol_type = other RNA
gcagcaagacctttggtttg

SEQ ID NO: 6879 - RNA, 20 nt, synthetic construct
  misc_feature 1..20: note = spacer sequence
  source 1..20: mol_type = other RNA
ggtttttaaataatactcag

SEQ ID NO: 6880 - RNA, 20 nt, synthetic construct
  misc_feature 1..20: note = spacer sequence
  source 1..20: mol_type = other RNA
cctgaggatgaaggcaaaga

SEQ ID NO: 6881 - RNA, 20 nt, synthetic construct
  misc_feature 1..20: note = spacer sequence
  source 1..20: mol_type = other RNA
ggcgaagctgctttattact

SEQ ID NO: 6882 - RNA, 20 nt, synthetic construct
  misc_feature 1..20: note = spacer sequence
  source 1..20: mol_type = other RNA
tcaggcgaagctgctttatt

SEQ ID NO: 6883 - RNA, 20 nt, synthetic construct
  misc_feature 1..20: note = spacer sequence
  source 1..20: mol_type = other RNA
tcctcaggcgaagctgcttt

SEQ ID NO: 6884 - RNA, 20 nt, synthetic construct
  misc_feature 1..20: note = spacer sequence
  source 1..20: mol_type = other RNA
ttgccttcatcctcaggcga

SEQ ID NO: 6885 - RNA, 20 nt, synthetic construct
  misc_feature 1..20: note = spacer sequence
  source 1..20: mol_type = other RNA
gcatactgaaaccaggagtt

SEQ ID NO: 6886 - RNA, 20 nt, synthetic construct
  misc_feature 1..20: note = spacer sequence
  source 1..20: mol_type = other RNA
gtatgctgagcagttaactt

SEQ ID NO: 6887 - RNA, 20 nt, synthetic construct
  misc_feature 1..20: note = spacer sequence
  source 1..20: mol_type = other RNA
tggtttcagtatgctgagca

SEQ ID NO: 6888 - RNA, 20 nt, synthetic construct
  misc_feature 1..20: note = spacer sequence
  source 1..20: mol_type = other RNA
aactcctggtttcagtatgc

SEQ ID NO: 6889 - RNA, 20 nt, synthetic construct
  misc_feature 1..20: note = spacer sequence
  source 1..20: mol_type = other RNA
aaacaacttcaaggccataa

SEQ ID NO: 6890 - RNA, 20 nt, synthetic construct
  misc_feature 1..20: note = spacer sequence
  source 1..20: mol_type = other RNA
aggccataaatacttggata

SEQ ID NO: 6891 - RNA, 20 nt, synthetic construct
  misc_feature 1..20: note = spacer sequence
  source 1..20: mol_type = other RNA
aagtatttatggccttgaag

SEQ ID NO: 6892 - RNA, 20 nt, synthetic construct
  misc_feature 1..20: note = spacer sequence
  source 1..20: mol_type = other RNA
cactatccaagtatttatgg

SEQ ID NO: 6893 - RNA, 20 nt, synthetic construct
  misc_feature 1..20: note = spacer sequence
  source 1..20: mol_type = other RNA
ggtcttggcactggatttcc

SEQ ID NO: 6894 - RNA, 20 nt, synthetic construct
  misc_feature 1..20: note = spacer sequence
  source 1..20: mol_type = other RNA
tggcactggatttcctgcaa

SEQ ID NO: 6895 - RNA, 20 nt, synthetic construct
  misc_feature 1..20: note = spacer sequence
  source 1..20: mol_type = other RNA
agtgccaagacctgatgtca

SEQ ID NO: 6896 - RNA, 20 nt, synthetic construct
  misc_feature 1..20: note = spacer sequence
  source 1..20: mol_type = other RNA
tgcaatttcagatgaaggct

SEQ ID NO: 6897 - RNA, 20 nt, synthetic construct
  misc_feature 1..20: note = spacer sequence
  source 1..20: mol_type = other RNA
gatgaaggcttgacttggct

SEQ ID NO: 6898 - RNA, 20 nt, synthetic construct
  misc_feature 1..20: note = spacer sequence
  source 1..20: mol_type = other RNA
gaaattgcaggaaatccagt

SEQ ID NO: 6899 - RNA, 20 nt, synthetic construct
  misc_feature 1..20: note = spacer sequence
  source 1..20: mol_type = other RNA
tctgaaattgcaggaaatcc

SEQ ID NO: 6900 - RNA, 20 nt, synthetic construct
  misc_feature 1..20: note = spacer sequence
  source 1..20: mol_type = other RNA
agccttcatctgaaattgca

SEQ ID NO: 6901 - RNA, 20 nt, synthetic construct
  misc_feature 1..20: note = spacer sequence
  source 1..20: mol_type = other RNA
aaagccaagtcaagccttca

SEQ ID NO: 6902 - RNA, 20 nt, synthetic construct
  misc_feature 1..20: note = spacer sequence
  source 1..20: mol_type = other RNA
tgtgataattcttggataac

SEQ ID NO: 6903 - RNA, 20 nt, synthetic construct
  misc_feature 1..20: note = spacer sequence
  source 1..20: mol_type = other RNA
catgaaaacatctaaagcca

SEQ ID NO: 6904 - RNA, 20 nt, synthetic construct
  misc_feature 1..20: note = spacer sequence
  source 1..20: mol_type = other RNA
tggataacctacaacgattt

SEQ ID NO: 6905 - RNA, 20 nt, synthetic construct
  misc_feature 1..20: note = spacer sequence
  source 1..20: mol_type = other RNA
aagaattatcacatgaaaac

SEQ ID NO: 6906 - RNA, 20 nt, synthetic construct
  misc_feature 1..20: note = spacer sequence
  source 1..20: mol_type = other RNA
ttgtaggttatccaagaatt

SEQ ID NO: 6907 - RNA, 20 nt, synthetic construct
  misc_feature 1..20: note = spacer sequence
  source 1..20: mol_type = other RNA
tatttaacccaccaacttta

SEQ ID NO: 6908 - RNA, 20 nt, synthetic construct
  misc_feature 1..20: note = spacer sequence
  source 1..20: mol_type = other RNA
tttgcttaaagttggtgggt

SEQ ID NO: 6909 - RNA, 20 nt, synthetic construct
  misc_feature 1..20: note = spacer sequence
  source 1..20: mol_type = other RNA
ttcttttgcttaaagttggt

SEQ ID NO: 6910 - RNA, 20 nt, synthetic construct
  misc_feature 1..20: note = spacer sequence
  source 1..20: mol_type = other RNA
cccacatatacgttctttct

SEQ ID NO: 6911 - RNA, 20 nt, synthetic construct
  misc_feature 1..20: note = spacer sequence
  source 1..20: mol_type = other RNA
tttacctctgccccgcaggg

SEQ ID NO: 6912 - RNA, 20 nt, synthetic construct
  misc_feature 1..20: note = spacer sequence
  source 1..20: mol_type = other RNA
gccccgcaggggaattaaaa

SEQ ID NO: 6913 - RNA, 20 nt, synthetic construct
  misc_feature 1..20: note = spacer sequence
  source 1..20: mol_type = other RNA
cctgcggggcagaggtaaac

SEQ ID NO: 6914 - RNA, 20 nt, synthetic construct
  misc_feature 1..20: note = spacer sequence
  source 1..20: mol_type = other RNA
ccagcgttttaattcccctg

SEQ ID NO: 6915 - RNA, 20 nt, synthetic construct
  misc_feature 1..20: note = spacer sequence
  source 1..20: mol_type = other RNA
tcaccagcgttttaattccc

SEQ ID NO: 6916 - RNA, 20 nt, synthetic construct
  misc_feature 1..20: note = spacer sequence
  source 1..20: mol_type = other RNA
ttatataagccttgcctgtt

SEQ ID NO: 6917 - RNA, 20 nt, synthetic construct
  misc_feature 1..20: note = spacer sequence
  source 1..20: mol_type = other RNA
gtgcagcctactactgtttc

SEQ ID NO: 6918 - RNA, 20 nt, synthetic construct
  misc_feature 1..20: note = spacer sequence
  source 1..20: mol_type = other RNA
tcaaacacaacaaaaagctc

SEQ ID NO: 6919 - RNA, 20 nt, synthetic construct
  misc_feature 1..20: note = spacer sequence
  source 1..20: mol_type = other RNA
aacacaacaaaaagctctta

SEQ ID NO: 6920 - RNA, 20 nt, synthetic construct
  misc_feature 1..20: note = spacer sequence
  source 1..20: mol_type = other RNA
taggttgcaaatgttaacct

SEQ ID NO: 6921 - RNA, 20 nt, synthetic construct
  misc_feature 1..20: note = spacer sequence
  source 1..20: mol_type = other RNA
aggttaacatttgcaaccta

SEQ ID NO: 6922 - RNA, 20 nt, synthetic construct
  misc_feature 1..20: note = spacer sequence
  source 1..20: mol_type = other RNA
tttacccttttgaaaaattc

SEQ ID NO: 6923 - RNA, 20 nt, synthetic construct
  misc_feature 1..20: note = spacer sequence
  source 1..20: mol_type = other RNA
aaagggtaaaagaatcaagg

SEQ ID NO: 6924 - RNA, 20 nt, synthetic construct
  misc_feature 1..20: note = spacer sequence
  source 1..20: mol_type = other RNA
atgggatggttggaaaaaaa

SEQ ID NO: 6925 - RNA, 20 nt, synthetic construct
  misc_feature 1..20: note = spacer sequence
  source 1..20: mol_type = other RNA
cattgaatttttcaaaaggg

SEQ ID NO: 6926 - RNA, 20 nt, synthetic construct
  misc_feature 1..20: note = spacer sequence
  source 1..20: mol_type = other RNA
aaccatcccattgaattttt

SEQ ID NO: 6927 - RNA, 20 nt, synthetic construct
  misc_feature 1..20: note = spacer sequence
  source 1..20: mol_type = other RNA
gtggttttttttttttccaa

SEQ ID NO: 6928 - RNA, 20 nt, synthetic construct
  misc_feature 1..20: note = spacer sequence
  source 1..20: mol_type = other RNA
aacgtaatacccaggcagtc

SEQ ID NO: 6929 - RNA, 20 nt, synthetic construct
  misc_feature 1..20: note = spacer sequence
  source 1..20: mol_type = other RNA
gataatttatagtacaacgt

SEQ ID NO: 6930 - RNA, 20 nt, synthetic construct
  misc_feature 1..20: note = spacer sequence
  source 1..20: mol_type = other RNA
gactgcctgggtattacgtt

SEQ ID NO: 6931 - RNA, 20 nt, synthetic construct
  misc_feature 1..20: note = spacer sequence
  source 1..20: mol_type = other RNA
cagtgttacacgttgtacta

SEQ ID NO: 6932 - RNA, 20 nt, synthetic construct
  misc_feature 1..20: note = spacer sequence
  source 1..20: mol_type = other RNA
aacttttcacccagcaaaat

SEQ ID NO: 6933 - RNA, 20 nt, synthetic construct
  misc_feature 1..20: note = spacer sequence
  source 1..20: mol_type = other RNA
cccagcaaaatctccttaca

SEQ ID NO: 6934 - RNA, 20 nt, synthetic construct
  misc_feature 1..20: note = spacer sequence
  source 1..20: mol_type = other RNA
ccttacaaattagggcaaca

SEQ ID NO: 6935 - RNA, 20 nt, synthetic construct
  misc_feature 1..20: note = spacer sequence
  source 1..20: mol_type = other RNA
ttacaaattagggcaacata

SEQ ID NO: 6936 - RNA, 20 nt, synthetic construct
  misc_feature 1..20: note = spacer sequence
  source 1..20: mol_type = other RNA
attggctttgtggtatatgt

SEQ ID NO: 6937 - RNA, 20 nt, synthetic construct
  misc_feature 1..20: note = spacer sequence
  source 1..20: mol_type = other RNA
ttttttttccattggctttg

SEQ ID NO: 6938 - RNA, 20 nt, synthetic construct
  misc_feature 1..20: note = spacer sequence
  source 1..20: mol_type = other RNA
attgaattgcaaacacagct

SEQ ID NO: 6939 - RNA, 20 nt, synthetic construct
  misc_feature 1..20: note = spacer sequence
  source 1..20: mol_type = other RNA
aggttttctttttttttcca

SEQ ID NO: 6940 - RNA, 20 nt, synthetic construct
  misc_feature 1..20: note = spacer sequence
  source 1..20: mol_type = other RNA
atcgaggttttctttttttt

SEQ ID NO: 6941 - RNA, 20 nt, synthetic construct
  misc_feature 1..20: note = spacer sequence
  source 1..20: mol_type = other RNA
attgacattaaaacaactaa

SEQ ID NO: 6942 - RNA, 20 nt, synthetic construct
  misc_feature 1..20: note = spacer sequence
  source 1..20: mol_type = other RNA
attgaaaagctgtgtttgca

SEQ ID NO: 6943 - RNA, 20 nt, synthetic construct
  misc_feature 1..20: note = spacer sequence
  source 1..20: mol_type = other RNA
taaggtaaaggttagttgtt

SEQ ID NO: 6944 - RNA, 20 nt, synthetic construct
  misc_feature 1..20: note = spacer sequence
  source 1..20: mol_type = other RNA
gtcataaggtaaaggttagt

SEQ ID NO: 6945 - RNA, 20 nt, synthetic construct
  misc_feature 1..20: note = spacer sequence
  source 1..20: mol_type = other RNA
aaagtattacatatgaaagt

SEQ ID NO: 6946 - RNA, 20 nt, synthetic construct
  misc_feature 1..20: note = spacer sequence
  source 1..20: mol_type = other RNA
tatgtaatacttttgatttt

SEQ ID NO: 6947 - RNA, 20 nt, synthetic construct
  misc_feature 1..20: note = spacer sequence
  source 1..20: mol_type = other RNA
ctttcatatgtaatactttt

SEQ ID NO: 6948 - RNA, 20 nt, synthetic construct
  misc_feature 1..20: note = spacer sequence
  source 1..20: mol_type = other RNA
cactttcatatgtaatactt

SEQ ID NO: 6949 - RNA, 20 nt, synthetic construct
  misc_feature 1..20: note = spacer sequence
  source 1..20: mol_type = other RNA
attttcatcaaataagtcta

SEQ ID NO: 6950 - RNA, 20 nt, synthetic construct
  misc_feature 1..20: note = spacer sequence
  source 1..20: mol_type = other RNA
tcaaataagtctaatttaga

SEQ ID NO: 6951 - RNA, 20 nt, synthetic construct
  misc_feature 1..20: note = spacer sequence
  source 1..20: mol_type = other RNA
aataagtctaatttagactc

SEQ ID NO: 6952 - RNA, 20 nt, synthetic construct
  misc_feature 1..20: note = spacer sequence
  source 1..20: mol_type = other RNA
aatttagactccaatacagt

SEQ ID NO: 6953 - RNA, 20 nt, synthetic construct
  misc_feature 1..20: note = spacer sequence
  source 1..20: mol_type = other RNA
aaattagacttatttgatga

SEQ ID NO: 6954 - RNA, 20 nt, synthetic construct
  misc_feature 1..20: note = spacer sequence
  source 1..20: mol_type = other RNA
aatacagtattaacagctca

SEQ ID NO: 6955 - RNA, 20 nt, synthetic construct
  misc_feature 1..20: note = spacer sequence
  source 1..20: mol_type = other RNA
aactttgacggtgaacaatc

SEQ ID NO: 6956 - RNA, 20 nt, synthetic construct
  misc_feature 1..20: note = spacer sequence
  source 1..20: mol_type = other RNA
aagtttgagctgttaatact

SEQ ID NO: 6957 - RNA, 20 nt, synthetic construct
  misc_feature 1..20: note = spacer sequence
  source 1..20: mol_type = other RNA
ccgtcaaagtttgagctgtt

SEQ ID NO: 6958 - RNA, 20 nt, synthetic construct
  misc_feature 1..20: note = spacer sequence
  source 1..20: mol_type = other RNA
ttttccaccttaatgcagtg

SEQ ID NO: 6959 - RNA, 20 nt, synthetic construct
  misc_feature 1..20: note = spacer sequence
  source 1..20: mol_type = other RNA
accttaatgcagtgtaggaa

SEQ ID NO: 6960 - RNA, 20 nt, synthetic construct
  misc_feature 1..20: note = spacer sequence
  source 1..20: mol_type = other RNA
tacactgcattaaggtggaa

SEQ ID NO: 6961 - RNA, 20 nt, synthetic construct
  misc_feature 1..20: note = spacer sequence
  source 1..20: mol_type = other RNA
tcctacactgcattaaggtg

SEQ ID NO: 6962 - RNA, 20 nt, synthetic construct
  misc_feature 1..20: note = spacer sequence
  source 1..20: mol_type = other RNA
taacaaactttaatgtgtgc

SEQ ID NO: 6963 - RNA, 20 nt, synthetic construct
  misc_feature 1..20: note = spacer sequence
  source 1..20: mol_type = other RNA
attttcgtaacaaactttaa

SEQ ID NO: 6964 - RNA, 20 nt, synthetic construct
  misc_feature 1..20: note = spacer sequence
  source 1..20: mol_type = other RNA
ctattgttttgaggagcttt

SEQ ID NO: 6965 - RNA, 20 nt, synthetic construct
  misc_feature 1..20: note = spacer sequence
  source 1..20: mol_type = other RNA
aaacaatagggatgttttta

SEQ ID NO: 6966 - RNA, 20 nt, synthetic construct
  misc_feature 1..20: note = spacer sequence
  source 1..20: mol_type = other RNA
tcaaaacaatagggatgttt

SEQ ID NO: 6967 - RNA, 20 nt, synthetic construct
  misc_feature 1..20: note = spacer sequence
  source 1..20: mol_type = other RNA
ccgttaccttgtcttaaatt

SEQ ID NO: 6968 - RNA, 20 nt, synthetic construct
  misc_feature 1..20: note = spacer sequence
  source 1..20: mol_type = other RNA
taaattaaaaaaaaaaaaaa

SEQ ID NO: 6969 - RNA, 20 nt, synthetic construct
  misc_feature 1..20: note = spacer sequence
  source 1..20: mol_type = other RNA
atttttttttttttttttaa

SEQ ID NO: 6970 - RNA, 20 nt, synthetic construct
  misc_feature 1..20: note = spacer sequence
  source 1..20: mol_type = other RNA
ctattttttttttttttttt

SEQ ID NO: 6971 - RNA, 20 nt, synthetic construct
  misc_feature 1..20: note = spacer sequence
  source 1..20: mol_type = other RNA
aattacgatttgtaaacttt

SEQ ID NO: 6972 - RNA, 20 nt, synthetic construct
  misc_feature 1..20: note = spacer sequence
  source 1..20: mol_type = other RNA
taattagaagtgctctctat

SEQ ID NO: 6973 - RNA, 20 nt, synthetic construct
  misc_feature 1..20: note = spacer sequence
  source 1..20: mol_type = other RNA
aaacttttaaaaagttacag

SEQ ID NO: 6974 - RNA, 20 nt, synthetic construct
  misc_feature 1..20: note = spacer sequence
  source 1..20: mol_type = other RNA
tattttcagtattttttgtt

SEQ ID NO: 6975 - RNA, 20 nt, synthetic construct
  misc_feature 1..20: note = spacer sequence
  source 1..20: mol_type = other RNA
gtattttttgttattttgtg

SEQ ID NO: 6976 - RNA, 20 nt, synthetic construct
  misc_feature 1..20: note = spacer sequence
  source 1..20: mol_type = other RNA
atttaaaaatagccacaaaa

SEQ ID NO: 6977 - RNA, 20 nt, synthetic construct
  misc_feature 1..20: note = spacer sequence
  source 1..20: mol_type = other RNA
cttctatttaaaaatagcca

SEQ ID NO: 6978 - RNA, 20 nt, synthetic construct
  misc_feature 1..20: note = spacer sequence
  source 1..20: mol_type = other RNA
aattgcttacagttccccac

SEQ ID NO: 6979 - RNA, 20 nt, synthetic construct
  misc_feature 1..20: note = spacer sequence
  source 1..20: mol_type = other RNA
ccaccagctggcgcggggct

SEQ ID NO: 6980 - RNA, 20 nt, synthetic construct
  misc_feature 1..20: note = spacer sequence
  source 1..20: mol_type = other RNA
cgctgtactgcagccccgcg

SEQ ID NO: 6981 - RNA, 20 nt, synthetic construct
  misc_feature 1..20: note = spacer sequence
  source 1..20: mol_type = other RNA
gctcccgctgtactgcagcc

SEQ ID NO: 6982 - RNA, 20 nt, synthetic construct
  misc_feature 1..20: note = spacer sequence
  source 1..20: mol_type = other RNA
gtacacctcaagctctacac

SEQ ID NO: 6983 - RNA, 20 nt, synthetic construct
  misc_feature 1..20: note = spacer sequence
  source 1..20: mol_type = other RNA
agctctacactccaggaagt

SEQ ID NO: 6984 - RNA, 20 nt, synthetic construct
  misc_feature 1..20: note = spacer sequence
  source 1..20: mol_type = other RNA
acactccaggaagtgtcact

SEQ ID NO: 6985 - RNA, 20 nt, synthetic construct
  misc_feature 1..20: note = spacer sequence
  source 1..20: mol_type = other RNA
aggaagtgtcactgtcacat

SEQ ID NO: 6986 - RNA, 20 nt, synthetic construct
  misc_feature 1..20: note = spacer sequence
  source 1..20: mol_type = other RNA
tggagtgtagagcttgaggt

SEQ ID NO: 6987 - RNA, 20 nt, synthetic construct
  misc_feature 1..20: note = spacer sequence
  source 1..20: mol_type = other RNA
ctgtcacattttcacaaatt

SEQ ID NO: 6988 - RNA, 20 nt, synthetic construct
  misc_feature 1..20: note = spacer sequence
  source 1..20: mol_type = other RNA
cattttcacaaattccagtc

SEQ ID NO: 6989 - RNA, 20 nt, synthetic construct
  misc_feature 1..20: note = spacer sequence
  source 1..20: mol_type = other RNA
caaattccagtctctaacga

SEQ ID NO: 6990 - RNA, 20 nt, synthetic construct
  misc_feature 1..20: note = spacer sequence
  source 1..20: mol_type = other RNA
agtctctaacgaggagcctc

SEQ ID NO: 6991 - RNA, 20 nt, synthetic construct
  misc_feature 1..20: note = spacer sequence
  source 1..20: mol_type = other RNA
ctaacgaggagcctctgctg

SEQ ID NO: 6992 - RNA, 20 nt, synthetic construct
  misc_feature 1..20: note = spacer sequence
  source 1..20: mol_type = other RNA
aacgaggagcctctgctgct

SEQ ID NO: 6993 - RNA, 20 nt, synthetic construct
  misc_feature 1..20: note = spacer sequence
  source 1..20: mol_type = other RNA
ttagagactggaatttgtga

SEQ ID NO: 6994 - RNA, 20 nt, synthetic construct
  misc_feature 1..20: note = spacer sequence
  source 1..20: mol_type = other RNA
tcgttagagactggaatttg

SEQ ID NO: 6995 - RNA, 20 nt, synthetic construct
  misc_feature 1..20: note = spacer sequence
  source 1..20: mol_type = other RNA
gctgctgagccagaatcctt

SEQ ID NO: 6996 - RNA, 20 nt, synthetic construct
  misc_feature 1..20: note = spacer sequence
  source 1..20: mol_type = other RNA
gcagcagaggctcctcgtta

SEQ ID NO: 6997 - RNA, 20 nt, synthetic construct
  misc_feature 1..20: note = spacer sequence
  source 1..20: mol_type = other RNA
ggctcagcagcagaggctcc

SEQ ID NO: 6998 - RNA, 20 nt, synthetic construct
  misc_feature 1..20: note = spacer sequence
  source 1..20: mol_type = other RNA
ttttcgggttcaacggatga

SEQ ID NO: 6999 - RNA, 20 nt, synthetic construct
  misc_feature 1..20: note = spacer sequence
  source 1..20: mol_type = other RNA
ggttcaacggatgaggtagc

SEQ ID NO: 7000 - RNA, 20 nt, synthetic construct
  misc_feature 1..20: note = spacer sequence
  source 1..20: mol_type = other RNA
acggatgaggtagcctcagc

SEQ ID NO: 7001 - RNA, 20 nt, synthetic construct
  misc_feature 1..20: note = spacer sequence
  source 1..20: mol_type = other RNA
gttgaacccgaaaaggattc

SEQ ID NO: 7002 - RNA, 20 nt, synthetic construct
  misc_feature 1..20: note = spacer sequence
  source 1..20: mol_type = other RNA
tccgttgaacccgaaaagga

SEQ ID NO: 7003 - RNA, 20 nt, synthetic construct
  misc_feature 1..20: note = spacer sequence
  source 1..20: mol_type = other RNA
gcaggtaactcttcagaagg

SEQ ID NO: 7004 - RNA, 20 nt, synthetic construct
  misc_feature 1..20: note = spacer sequence
  source 1..20: mol_type = other RNA
tcagaaggctttaggactgc

SEQ ID NO: 7005 - RNA, 20 nt, synthetic construct
  misc_feature 1..20: note = spacer sequence
  source 1..20: mol_type = other RNA
gaaggctttaggactgcagc

SEQ ID NO: 7006 - RNA, 20 nt, synthetic construct
  misc_feature 1..20: note = spacer sequence
  source 1..20: mol_type = other RNA
gaagagttacctgctgaggc

SEQ ID NO: 7007 - RNA, 20 nt, synthetic construct
  misc_feature 1..20: note = spacer sequence
  source 1..20: mol_type = other RNA
taaagccttctgaagagtta

SEQ ID NO: 7008 - RNA, 20 nt, synthetic construct
  misc_feature 1..20: note = spacer sequence
  source 1..20: mol_type = other RNA
gacacccccttctcaagttc

SEQ ID NO: 7009 - RNA, 20 nt, synthetic construct
  misc_feature 1..20: note = spacer sequence
  source 1..20: mol_type = other RNA
gaggctgcagtcctaaagcc

SEQ ID NO: 7010 - RNA, 20 nt, synthetic construct
  misc_feature 1..20: note = spacer sequence
  source 1..20: mol_type = other RNA
caagttctgaagcagtgtct

SEQ ID NO: 7011 - RNA, 20 nt, synthetic construct
  misc_feature 1..20: note = spacer sequence
  source 1..20: mol_type = other RNA
agttctgaagcagtgtctac

SEQ ID NO: 7012 - RNA, 20 nt, synthetic construct
  misc_feature 1..20: note = spacer sequence
  source 1..20: mol_type = other RNA
gaagcagtgtctacatttcc

SEQ ID NO: 7013 - RNA, 20 nt, synthetic construct
  misc_feature 1..20: note = spacer sequence
  source 1..20: mol_type = other RNA
gaacttgagaagggggtgtc

SEQ ID NO: 7014 - RNA, 20 nt, synthetic construct
  misc_feature 1..20: note = spacer sequence
  source 1..20: mol_type = other RNA
acatttcccacttggctaat

SEQ ID NO: 7015 - RNA, 20 nt, synthetic construct
  misc_feature 1..20: note = spacer sequence
  source 1..20: mol_type = other RNA
cacttggctaatgggaggtt

SEQ ID NO: 7016 - RNA, 20 nt, synthetic construct
  misc_feature 1..20: note = spacer sequence
  source 1..20: mol_type = other RNA
cattagccaagtgggaaatg

SEQ ID NO: 7017 - RNA, 20 nt, synthetic construct
  misc_feature 1..20: note = spacer sequence
  source 1..20: mol_type = other RNA
acggttttgttaccacctgc

SEQ ID NO: 7018 - RNA, 20 nt, synthetic construct
  misc_feature 1..20: note = spacer sequence
  source 1..20: mol_type = other RNA
gtcacctcaggcttttcctt

SEQ ID NO: 7019 - RNA, 20 nt, synthetic construct
  misc_feature 1..20: note = spacer sequence
  source 1..20: mol_type = other RNA
cctcaggcttttcctttcct

SEQ ID NO: 7020 - RNA, 20 nt, synthetic construct
  misc_feature 1..20: note = spacer sequence
  source 1..20: mol_type = other RNA
ggcttttcctttcctcgggc

SEQ ID NO: 7021 - RNA, 20 nt, synthetic construct
  misc_feature 1..20: note = spacer sequence
  source 1..20: mol_type = other RNA
tttcctcgggcttcttcctt

SEQ ID NO: 7022 - RNA, 20 nt, synthetic construct
  misc_feature 1..20: note = spacer sequence
  source 1..20: mol_type = other RNA
tcgggcttcttccttctctc

SEQ ID NO: 7023 - RNA, 20 nt, synthetic construct
  misc_feature 1..20: note = spacer sequence
  source 1..20: mol_type = other RNA
ggcttcttccttctctctac

SEQ ID NO: 7024 - RNA, 20 nt, synthetic construct
  misc_feature 1..20: note = spacer sequence
  source 1..20: mol_type = other RNA
tccttctctctacgagactc

SEQ ID NO: 7025 - RNA, 20 nt, synthetic construct
  misc_feature 1..20: note = spacer sequence
  source 1..20: mol_type = other RNA
ttctctctacgagactctct

SEQ ID NO: 7026 - RNA, 20 nt, synthetic construct
  misc_feature 1..20: note = spacer sequence
  source 1..20: mol_type = other RNA
ctctacgagactctctatct

SEQ ID NO: 7027 - RNA, 20 nt, synthetic construct
  misc_feature 1..20: note = spacer sequence
  source 1..20: mol_type = other RNA
ctacgagactctctatctct

SEQ ID NO: 7028 - RNA, 20 nt, synthetic construct
  misc_feature 1..20: note = spacer sequence
  source 1..20: mol_type = other RNA
acgagactctctatctctag

SEQ ID NO: 7029 - RNA, 20 nt, synthetic construct
  misc_feature 1..20: note = spacer sequence
  source 1..20: mol_type = other RNA
tagagagaaggaagaagccc

SEQ ID NO: 7030 - RNA, 20 nt, synthetic construct
  misc_feature 1..20: note = spacer sequence
  source 1..20: mol_type = other RNA
cgtagagagaaggaagaagc

SEQ ID NO: 7031 - RNA, 20 nt, synthetic construct
  misc_feature 1..20: note = spacer sequence
  source 1..20: mol_type = other RNA
ctatctctagaatctctctc

SEQ ID NO: 7032 - RNA, 20 nt, synthetic construct
  misc_feature 1..20: note = spacer sequence
  source 1..20: mol_type = other RNA
atctctagaatctctctctc

SEQ ID NO: 7033 - RNA, 20 nt, synthetic construct
  misc_feature 1..20: note = spacer sequence
  source 1..20: mol_type = other RNA
ctagaatctctctctctgtc

SEQ ID NO: 7034 - RNA, 20 nt, synthetic construct
  misc_feature 1..20: note = spacer sequence
  source 1..20: mol_type = other RNA
agaatctctctctctgtctc

SEQ ID NO: 7035 - RNA, 20 nt, synthetic construct
  misc_feature 1..20: note = spacer sequence
  source 1..20: mol_type = other RNA
agagatagagagtctcgtag

SEQ ID NO: 7036 - RNA, 20 nt, synthetic construct
  misc_feature 1..20: note = spacer sequence
  source 1..20: mol_type = other RNA
ctctctctgtctcgatgccc

SEQ ID NO: 7037 - RNA, 20 nt, synthetic construct
  misc_feature 1..20: note = spacer sequence
  source 1..20: mol_type = other RNA
ctctctgtctcgatgcccac

SEQ ID NO: 7038 - RNA, 20 nt, synthetic construct
  misc_feature 1..20: note = spacer sequence
  source 1..20: mol_type = other RNA
ctctgtctcgatgcccacta

SEQ ID NO: 7039 - RNA, 20 nt, synthetic construct
  misc_feature 1..20: note = spacer sequence
  source 1..20: mol_type = other RNA
ctgtctcgatgcccactaga

SEQ ID NO: 7040 - RNA, 20 nt, synthetic construct
  misc_feature 1..20: note = spacer sequence
  source 1..20: mol_type = other RNA
gtctcgatgcccactagagc

SEQ ID NO: 7041 - RNA, 20 nt, synthetic construct
  misc_feature 1..20: note = spacer sequence
  source 1..20: mol_type = other RNA
cgatgcccactagagcgtct

SEQ ID NO: 7042 - RNA, 20 nt, synthetic construct
  misc_feature 1..20: note = spacer sequence
  source 1..20: mol_type = other RNA
atgcccactagagcgtctat

SEQ ID NO: 7043 - RNA, 20 nt, synthetic construct
  misc_feature 1..20: note = spacer sequence
  source 1..20: mol_type = other RNA
agacagagagagagattcta

SEQ ID NO: 7044 - RNA, 20 nt, synthetic construct
  misc_feature 1..20: note = spacer sequence
  source 1..20: mol_type = other RNA
agtgggcatcgagacagaga

SEQ ID NO: 7045 - RNA, 20 nt, synthetic construct
  misc_feature 1..20: note = spacer sequence
  source 1..20: mol_type = other RNA
atttctctcttccaagtctc

SEQ ID NO: 7046 - RNA, 20 nt, synthetic construct
  misc_feature 1..20: note = spacer sequence
  source 1..20: mol_type = other RNA
ctcttccaagtctctgtgcc

SEQ ID NO: 7047 - RNA, 20 nt, synthetic construct
  misc_feature 1..20: note = spacer sequence
  source 1..20: mol_type = other RNA
cttccaagtctctgtgcctg

SEQ ID NO: 7048 - RNA, 20 nt, synthetic construct
  misc_feature 1..20: note = spacer sequence
  source 1..20: mol_type = other RNA
tccaagtctctgtgcctgtc

SEQ ID NO: 7049 - RNA, 20 nt, synthetic construct
  misc_feature 1..20: note = spacer sequence
  source 1..20: mol_type = other RNA
aagtctctgtgcctgtcccg

SEQ ID NO: 7050 - RNA, 20 nt, synthetic construct
  misc_feature 1..20: note = spacer sequence
  source 1..20: mol_type = other RNA
ctgtgcctgtcccggtcagg

SEQ ID NO: 7051 - RNA, 20 nt, synthetic construct
  misc_feature 1..20: note = spacer sequence
  source 1..20: mol_type = other RNA
gtgcctgtcccggtcagggc

SEQ ID NO: 7052 - RNA, 20 nt, synthetic construct
  misc_feature 1..20: note = spacer sequence
  source 1..20: mol_type = other RNA
cggtcagggctcctccttcc

SEQ ID NO: 7053 - RNA, 20 nt, synthetic construct
  misc_feature 1..20: note = spacer sequence
  source 1..20: mol_type = other RNA
gggctcctccttccccactc

SEQ ID NO: 7054 - RNA, 20 nt, synthetic construct
  misc_feature 1..20: note = spacer sequence
  source 1..20: mol_type = other RNA
tccttccccactctctcctg

SEQ ID NO: 7055 - RNA, 20 nt, synthetic construct
  misc_feature 1..20: note = spacer sequence
  source 1..20: mol_type = other RNA
ttccccactctctcctgtca

SEQ ID NO: 7056 - RNA, 20 nt, synthetic construct
  misc_feature 1..20: note = spacer sequence
  source 1..20: mol_type = other RNA
ccactctctcctgtcacggt

SEQ ID NO: 7057 - RNA, 20 nt, synthetic construct
  misc_feature 1..20: note = spacer sequence
  source 1..20: mol_type = other RNA
ctcctgtcacggttactatt

SEQ ID NO: 7058 - RNA, 20 nt, synthetic construct
  misc_feature 1..20: note = spacer sequence
  source 1..20: mol_type = other RNA
cctgtcacggttactattat

SEQ ID NO: 7059 - RNA, 20 nt, synthetic construct
  misc_feature 1..20: note = spacer sequence
  source 1..20: mol_type = other RNA
tgtcacggttactattatct

SEQ ID NO: 7060 - RNA, 20 nt, synthetic construct
  misc_feature 1..20: note = spacer sequence
  source 1..20: mol_type = other RNA
cggttactattatctctatc

SEQ ID NO: 7061 - RNA, 20 nt, synthetic construct
  misc_feature 1..20: note = spacer sequence
  source 1..20: mol_type = other RNA
ctatcatcattacggttccc

SEQ ID NO: 7062 - RNA, 20 nt, synthetic construct
  misc_feature 1..20: note = spacer sequence
  source 1..20: mol_type = other RNA
atcatcattacggttcccat

SEQ ID NO: 7063 - RNA, 20 nt, synthetic construct
  misc_feature 1..20: note = spacer sequence
  source 1..20: mol_type = other RNA
tcattacggttcccataccg

SEQ ID NO: 7064 - RNA, 20 nt, synthetic construct
  misc_feature 1..20: note = spacer sequence
  source 1..20: mol_type = other RNA
ttacggttcccataccgttc

SEQ ID NO: 7065 - RNA, 20 nt, synthetic construct
  misc_feature 1..20: note = spacer sequence
  source 1..20: mol_type = other RNA
cataccgttcccggtcattt

SEQ ID NO: 7066 - RNA, 20 nt, synthetic construct
  misc_feature 1..20: note = spacer sequence
  source 1..20: mol_type = other RNA
cggtcattttccaccctatt

SEQ ID NO: 7067 - RNA, 20 nt, synthetic construct
  misc_feature 1..20: note = spacer sequence
  source 1..20: mol_type = other RNA
ttttccaccctatttccaaa

SEQ ID NO: 7068 - RNA, 20 nt, synthetic construct
  misc_feature 1..20: note = spacer sequence
  source 1..20: mol_type = other RNA
accctatttccaaaagatct

SEQ ID NO: 7069 - RNA, 20 nt, synthetic construct
  misc_feature 1..20: note = spacer sequence
  source 1..20: mol_type = other RNA
aaaagatcttcttccaaacc

SEQ ID NO: 7070 - RNA, 20 nt, synthetic construct
  misc_feature 1..20: note = spacer sequence
  source 1..20: mol_type = other RNA
tttggaaatagggtggaaaa

SEQ ID NO: 7071 - RNA, 20 nt, synthetic construct
  misc_feature 1..20: note = spacer sequence
  source 1..20: mol_type = other RNA
tcttccaaacctttcttggt

SEQ ID NO: 7072 - RNA, 20 nt, synthetic construct
  misc_feature 1..20: note = spacer sequence
  source 1..20: mol_type = other RNA
tccaaacctttcttggtctc

SEQ ID NO: 7073 - RNA, 20 nt, synthetic construct
  misc_feature 1..20: note = spacer sequence
  source 1..20: mol_type = other RNA
aaacctttcttggtctctac

SEQ ID NO: 7074 - RNA, 20 nt, synthetic construct
  misc_feature 1..20: note = spacer sequence
  source 1..20: mol_type = other RNA
tggtctctacctgaattgaa

SEQ ID NO: 7075 - RNA, 20 nt, synthetic construct
  misc_feature 1..20: note = spacer sequence
  source 1..20: mol_type = other RNA
ctacctgaattgaactgctg

SEQ ID NO: 7076 - RNA, 20 nt, synthetic construct
  misc_feature 1..20: note = spacer sequence
  source 1..20: mol_type = other RNA
acctgaattgaactgctgcc

SEQ ID NO: 7077 - RNA, 20 nt, synthetic construct
  misc_feature 1..20: note = spacer sequence
  source 1..20: mol_type = other RNA
ggtagagaccaagaaaggtt

SEQ ID NO: 7078 - RNA, 20 nt, synthetic construct
  misc_feature 1..20: note = spacer sequence
  source 1..20: mol_type = other RNA
attcaggtagagaccaagaa

SEQ ID NO: 7079 - RNA, 20 nt, synthetic construct
  misc_feature 1..20: note = spacer sequence
  source 1..20: mol_type = other RNA
tttctaaactgctgtggctg

SEQ ID NO: 7080 - RNA, 20 nt, synthetic construct
  misc_feature 1..20: note = spacer sequence
  source 1..20: mol_type = other RNA
aaactgctgtggctgctgct

SEQ ID NO: 7081 - RNA, 20 nt, synthetic construct
  misc_feature 1..20: note = spacer sequence
  source 1..20: mol_type = other RNA
accaacacagcagcagccac

SEQ ID NO: 7082 - RNA, 20 nt, synthetic construct
  misc_feature 1..20: note = spacer sequence
  source 1..20: mol_type = other RNA
caacagcctccaccaacaca

SEQ ID NO: 7083 - RNA, 20 nt, synthetic construct
  misc_feature 1..20: note = spacer sequence
  source 1..20: mol_type = other RNA
gtctctgtcttcaggacccc

SEQ ID NO: 7084 - RNA, 20 nt, synthetic construct
  misc_feature 1..20: note = spacer sequence
  source 1..20: mol_type = other RNA
ctgtcttcaggaccccctgg

SEQ ID NO: 7085 - RNA, 20 nt, synthetic construct
  misc_feature 1..20: note = spacer sequence
  source 1..20: mol_type = other RNA
gtcttcaggaccccctgggc

SEQ ID NO: 7086 - RNA, 20 nt, synthetic construct
  misc_feature 1..20: note = spacer sequence
  source 1..20: mol_type = other RNA
tcaggaccccctgggcctgg

SEQ ID NO: 7087 - RNA, 20 nt, synthetic construct
  misc_feature 1..20: note = spacer sequence
  source 1..20: mol_type = other RNA
ggaccccctgggcctggccc

SEQ ID NO: 7088 - RNA, 20 nt, synthetic construct
  misc_feature 1..20: note = spacer sequence
  source 1..20: mol_type = other RNA
tgaagacagagacggaaggc

SEQ ID NO: 7089 - RNA, 20 nt, synthetic construct
  misc_feature 1..20: note = spacer sequence
  source 1..20: mol_type = other RNA
ggggcccagggccaggccca

SEQ ID NO: 7090 - RNA, 20 nt, synthetic construct
  misc_feature 1..20: note = spacer sequence
  source 1..20: mol_type = other RNA
accaggcctaacaaaggggc

SEQ ID NO: 7091 - RNA, 20 nt, synthetic construct
  misc_feature 1..20: note = spacer sequence
  source 1..20: mol_type = other RNA
caccgcatggcccctttgtt

SEQ ID NO: 7092 - RNA, 20 nt, synthetic construct
  misc_feature 1..20: note = spacer sequence
  source 1..20: mol_type = other RNA
cttcccaccgcatggcccct

SEQ ID NO: 7093 - RNA, 20 nt, synthetic construct
  misc_feature 1..20: note = spacer sequence
  source 1..20: mol_type = other RNA
ttccatgaggtggaggcatc

SEQ ID NO: 7094 - RNA, 20 nt, synthetic construct
  misc_feature 1..20: note = spacer sequence
  source 1..20: mol_type = other RNA
atgaggtggaggcatcgcaa

SEQ ID NO: 7095 - RNA, 20 nt, synthetic construct
  misc_feature 1..20: note = spacer sequence
  source 1..20: mol_type = other RNA
tggaatgaaaggtcccttcc

SEQ ID NO: 7096 - RNA, 20 nt, synthetic construct
  misc_feature 1..20: note = spacer sequence
  source 1..20: mol_type = other RNA
acctcatggaatgaaaggtc

SEQ ID NO: 7097 - RNA, 20 nt, synthetic construct
  misc_feature 1..20: note = spacer sequence
  source 1..20: mol_type = other RNA
caaagccccctggtcctggc

SEQ ID NO: 7098 - RNA, 20 nt, synthetic construct
  misc_feature 1..20: note = spacer sequence
  source 1..20: mol_type = other RNA
tggcggtgggcctctgtgca

SEQ ID NO: 7099 - RNA, 20 nt, synthetic construct
  misc_feature 1..20: note = spacer sequence
  source 1..20: mol_type = other RNA
gtgcatcatgtgcggtggca

SEQ ID NO: 7100 - RNA, 20 nt, synthetic construct
  misc_feature 1..20: note = spacer sequence
  source 1..20: mol_type = other RNA
tgtgcggtggcatgggacgg

SEQ ID NO: 7101 - RNA, 20 nt, synthetic construct
  misc_feature 1..20: note = spacer sequence
  source 1..20: mol_type = other RNA
catgccaccgcacatgatgc

SEQ ID NO: 7102 - RNA, 20 nt, synthetic construct
  misc_feature 1..20: note = spacer sequence
  source 1..20: mol_type = other RNA
aagggaaccgctgtaagtga

SEQ ID NO: 7103 - RNA, 20 nt, synthetic construct
  misc_feature 1..20: note = spacer sequence
  source 1..20: mol_type = other RNA
ctttgatgccgccccgtccc

SEQ ID NO: 7104 - RNA, 20 nt, synthetic construct
  misc_feature 1..20: note = spacer sequence
  source 1..20: mol_type = other RNA
cttacagcggttccctttga

SEQ ID NO: 7105 - RNA, 20 nt, synthetic construct
  misc_feature 1..20: note = spacer sequence
  source 1..20: mol_type = other RNA
tggagggcgctggagtggga

SEQ ID NO: 7106 - RNA, 20 nt, synthetic construct
  misc_feature 1..20: note = spacer sequence
  source 1..20: mol_type = other RNA
aggaatgcccccacctcact

SEQ ID NO: 7107 - RNA, 20 nt, synthetic construct
  misc_feature 1..20: note = spacer sequence
  source 1..20: mol_type = other RNA
agcgccctccaggaatgccc

SEQ ID NO: 7108 - RNA, 20 nt, synthetic construct
  misc_feature 1..20: note = spacer sequence
  source 1..20: mol_type = other RNA
cactccagcgccctccagga

SEQ ID NO: 7109 - RNA, 20 nt, synthetic construct
  misc_feature 1..20: note = spacer sequence
  source 1..20: mol_type = other RNA
tcccactccagcgccctcca

SEQ ID NO: 7110 - RNA, 20 nt, synthetic construct
  misc_feature 1..20: note = spacer sequence
  source 1..20: mol_type = other RNA
catcccactccagcgccctc

SEQ ID NO: 7111 - RNA, 20 nt, synthetic construct
  misc_feature 1..20: note = spacer sequence
  source 1..20: mol_type = other RNA
tggcgcccggcccggtctca

SEQ ID NO: 7112 - RNA, 20 nt, synthetic construct
  misc_feature 1..20: note = spacer sequence
  source 1..20: mol_type = other RNA
tcttggcgcccggcccggtc

SEQ ID NO: 7113 - RNA, 20 nt, synthetic construct
  misc_feature 1..20: note = spacer sequence
  source 1..20: mol_type = other RNA
actggtcttcttggcgcccg

SEQ ID NO: 7114 - RNA, 20 nt, synthetic construct
  misc_feature 1..20: note = spacer sequence
  source 1..20: mol_type = other RNA
ggcaccatctactggtcttc

SEQ ID NO: 7115 - RNA, 20 nt, synthetic construct
  misc_feature 1..20: note = spacer sequence
  source 1..20: mol_type = other RNA
aattacaggaccaggggcaa

SEQ ID NO: 7116 - RNA, 20 nt, synthetic construct
  misc_feature 1..20: note = spacer sequence
  source 1..20: mol_type = other RNA
tgtaattggacttcaggcac

SEQ ID NO: 7117 - RNA, 20 nt, synthetic construct
  misc_feature 1..20: note = spacer sequence
  source 1..20: mol_type = other RNA
ttgagtgcctaaaagacgac

SEQ ID NO: 7118 - RNA, 20 nt, synthetic construct
  misc_feature 1..20: note = spacer sequence
  source 1..20: mol_type = other RNA
aggagttgcccctggtcctg

SEQ ID NO: 7119 - RNA, 20 nt, synthetic construct
  misc_feature 1..20: note = spacer sequence
  source 1..20: mol_type = other RNA
tttaggcactcaaggagttg

SEQ ID NO: 7120 - RNA, 20 nt, synthetic construct
  misc_feature 1..20: note = spacer sequence
  source 1..20: mol_type = other RNA
tcttttaggcactcaaggag

SEQ ID NO: 7121 - RNA, 20 nt, synthetic construct
  misc_feature 1..20: note = spacer sequence
  source 1..20: mol_type = other RNA
gtggtgtttacatttttatt

SEQ ID NO: 7122 - RNA, 20 nt, synthetic construct
  misc_feature 1..20: note = spacer sequence
  source 1..20: mol_type = other RNA
tcggtggtgtttacattttt

SEQ ID NO: 7123 - RNA, 20 nt, synthetic construct
  misc_feature 1..20: note = spacer sequence
  source 1..20: mol_type = other RNA
agtttcagctgtgttctgtg

SEQ ID NO: 7124 - RNA, 20 nt, synthetic construct
  misc_feature 1..20: note = spacer sequence
  source 1..20: mol_type = other RNA
gctgtgttctgtggcgctta

SEQ ID NO: 7125 - RNA, 20 nt, synthetic construct
  misc_feature 1..20: note = spacer sequence
  source 1..20: mol_type = other RNA
gtggcgcttaaagcaaaata

SEQ ID NO: 7126 - RNA, 20 nt, synthetic construct
  misc_feature 1..20: note = spacer sequence
  source 1..20: mol_type = other RNA
acccacaatcttcaaatttc

SEQ ID NO: 7127 - RNA, 20 nt, synthetic construct
  misc_feature 1..20: note = spacer sequence
  source 1..20: mol_type = other RNA
tcaaatttcatagtttgcca

SEQ ID NO: 7128 - RNA, 20 nt, synthetic construct
  misc_feature 1..20: note = spacer sequence
  source 1..20: mol_type = other RNA
aatttcatagtttgccactc

SEQ ID NO: 7129 - RNA, 20 nt, synthetic construct
  misc_feature 1..20: note = spacer sequence
  source 1..20: mol_type = other RNA
tagtttgccactctgtcaca

SEQ ID NO: 7130 - RNA, 20 nt, synthetic construct
  misc_feature 1..20: note = spacer sequence
  source 1..20: mol_type = other RNA
gtcacaaacccagtgtgagg

SEQ ID NO: 7131 - RNA, 20 nt, synthetic construct
  misc_feature 1..20: note = spacer sequence
  source 1..20: mol_type = other RNA
caaacccagtgtgaggccta

SEQ ID NO: 7132 - RNA, 20 nt, synthetic construct
  misc_feature 1..20: note = spacer sequence
  source 1..20: mol_type = other RNA
cactgggtttgtgacagagt

SEQ ID NO: 7133 - RNA, 20 nt, synthetic construct
  misc_feature 1..20: note = spacer sequence
  source 1..20: mol_type = other RNA
ttgcaattgcttgccttagg

SEQ ID NO: 7134 - RNA, 20 nt, synthetic construct
  misc_feature 1..20: note = spacer sequence
  source 1..20: mol_type = other RNA
aatacaggtagaggccagaa

SEQ ID NO: 7135 - RNA, 20 nt, synthetic construct
  misc_feature 1..20: note = spacer sequence
  source 1..20: mol_type = other RNA
acctgtattagatactttaa

SEQ ID NO: 7136 - RNA, 20 nt, synthetic construct
  misc_feature 1..20: note = spacer sequence
  source 1..20: mol_type = other RNA
ggcctctacctgtattagat

SEQ ID NO: 7137 - RNA, 20 nt, synthetic construct
  misc_feature 1..20: note = spacer sequence
  source 1..20: mol_type = other RNA
cagtttattctggcctctac

SEQ ID NO: 7138 - RNA, 20 nt, synthetic construct
  misc_feature 1..20: note = spacer sequence
  source 1..20: mol_type = other RNA
aagagtatgtcaaaatctcc

SEQ ID NO: 7139 - RNA, 20 nt, synthetic construct
  misc_feature 1..20: note = spacer sequence
  source 1..20: mol_type = other RNA
ttgaaaattggtattaccat

SEQ ID NO: 7140 - RNA, 20 nt, synthetic construct
  misc_feature 1..20: note = spacer sequence
  source 1..20: mol_type = other RNA
aaatctcctgtagctttcat

SEQ ID NO: 7141 - RNA, 20 nt, synthetic construct
  misc_feature 1..20: note = spacer sequence
  source 1..20: mol_type = other RNA
cctgtagctttcattagaag

SEQ ID NO: 7142 - RNA, 20 nt, synthetic construct
  misc_feature 1..20: note = spacer sequence
  source 1..20: mol_type = other RNA
tgtagctttcattagaagct

SEQ ID NO: 7143 - RNA, 20 nt, synthetic construct
  misc_feature 1..20: note = spacer sequence
  source 1..20: mol_type = other RNA
ttagaagctgtcttcccact

SEQ ID NO: 7144 - RNA, 20 nt, synthetic construct
  misc_feature 1..20: note = spacer sequence
  source 1..20: mol_type = other RNA
aatgaaagctacaggagatt

SEQ ID NO: 7145 - RNA, 20 nt, synthetic construct
  misc_feature 1..20: note = spacer sequence
  source 1..20: mol_type = other RNA
tcccactccaaatacatttg

SEQ ID NO: 7146 - RNA, 20 nt, synthetic construct
  misc_feature 1..20: note = spacer sequence
  source 1..20: mol_type = other RNA
cactccaaatacatttgaga

SEQ ID NO: 7147 - RNA, 20 nt, synthetic construct
  misc_feature 1..20: note = spacer sequence
  source 1..20: mol_type = other RNA
aaatacatttgagaaacaca

SEQ ID NO: 7148 - RNA, 20 nt, synthetic construct
  misc_feature 1..20: note = spacer sequence
  source 1..20: mol_type = other RNA
aatgtatttggagtgggaag

SEQ ID NO: 7149 - RNA, 20 nt, synthetic construct
  misc_feature 1..20: note = spacer sequence
  source 1..20: mol_type = other RNA
caaatgtatttggagtggga

SEQ ID NO: 7150 - RNA, 20 nt, synthetic construct
  misc_feature 1..20: note = spacer sequence
  source 1..20: mol_type = other RNA
taatgagataaatacattca

SEQ ID NO: 7151 - RNA, 20 nt, synthetic construct
  misc_feature 1..20: note = spacer sequence
  source 1..20: mol_type = other RNA
ttaggacttagcacactgtg

SEQ ID NO: 7152 - RNA, 20 nt, synthetic construct
  misc_feature 1..20: note = spacer sequence
  source 1..20: mol_type = other RNA
cattaggacttagcacactg

SEQ ID NO: 7153 - RNA, 20 nt, synthetic construct
  misc_feature 1..20: note = spacer sequence
  source 1..20: mol_type = other RNA
ctatcagtaactattcaagc

SEQ ID NO: 7154 - RNA, 20 nt, synthetic construct
  misc_feature 1..20: note = spacer sequence
  source 1..20: mol_type = other RNA
gtaactattcaagctaacta

SEQ ID NO: 7155 - RNA, 20 nt, synthetic construct
  misc_feature 1..20: note = spacer sequence
  source 1..20: mol_type = other RNA
agctaactaagcatactgca

SEQ ID NO: 7156 - RNA, 20 nt, synthetic construct
  misc_feature 1..20: note = spacer sequence
  source 1..20: mol_type = other RNA
aagtgtgcacctgcagtatg

SEQ ID NO: 7157 - RNA, 20 nt, synthetic construct
  misc_feature 1..20: note = spacer sequence
  source 1..20: mol_type = other RNA
tattactagaaaaaaatgag

SEQ ID NO: 7158 - RNA, 20 nt, synthetic construct
  misc_feature 1..20: note = spacer sequence
  source 1..20: mol_type = other RNA
agtaataagacggggtgtaa

SEQ ID NO: 7159 - RNA, 20 nt, synthetic construct
  misc_feature 1..20: note = spacer sequence
  source 1..20: mol_type = other RNA
tttttttctagtaataagac

SEQ ID NO: 7160 - RNA, 20 nt, synthetic construct
  misc_feature 1..20: note = spacer sequence
  source 1..20: mol_type = other RNA
ctgacctagaaaacccagga

SEQ ID NO: 7161 - RNA, 20 nt, synthetic construct
  misc_feature 1..20: note = spacer sequence
  source 1..20: mol_type = other RNA
gtgacctcatttttttctag

SEQ ID NO: 7162 - RNA, 20 nt, synthetic construct
  misc_feature 1..20: note = spacer sequence
  source 1..20: mol_type = other RNA
aggtcagtgacctcattttt

SEQ ID NO: 7163 - RNA, 20 nt, synthetic construct
  misc_feature 1..20: note = spacer sequence
  source 1..20: mol_type = other RNA
tgggttttctaggtcagtga

SEQ ID NO: 7164 - RNA, 20 nt, synthetic construct
  misc_feature 1..20: note = spacer sequence
  source 1..20: mol_type = other RNA
ttcctgggttttctaggtca

SEQ ID NO: 7165 - RNA, 20 nt, synthetic construct
  misc_feature 1..20: note = spacer sequence
  source 1..20: mol_type = other RNA
tctttcctgggttttctagg

SEQ ID NO: 7166 - RNA, 20 nt, synthetic construct
  misc_feature 1..20: note = spacer sequence
  source 1..20: mol_type = other RNA
tcctctttcctgggttttct

SEQ ID NO: 7167 - RNA, 20 nt, synthetic construct
  misc_feature 1..20: note = spacer sequence
  source 1..20: mol_type = other RNA
ctttgactccatgctacact

SEQ ID NO: 7168 - RNA, 20 nt, synthetic construct
  misc_feature 1..20: note = spacer sequence
  source 1..20: mol_type = other RNA
ttgactccatgctacactta

SEQ ID NO: 7169 - RNA, 20 nt, synthetic construct
  misc_feature 1..20: note = spacer sequence
  source 1..20: mol_type = other RNA
aagagatcttcctctttcct

SEQ ID NO: 7170 - RNA, 20 nt, synthetic construct
  misc_feature 1..20: note = spacer sequence
  source 1..20: mol_type = other RNA
atgctacacttagtccatat

SEQ ID NO: 7171 - RNA, 20 nt, synthetic construct
  misc_feature 1..20: note = spacer sequence
  source 1..20: mol_type = other RNA
atattattaaaatgcctcat

SEQ ID NO: 7172 - RNA, 20 nt, synthetic construct
  misc_feature 1..20: note = spacer sequence
  source 1..20: mol_type = other RNA
tgcagttactatgcaatgtg

SEQ ID NO: 7173 - RNA, 20 nt, synthetic construct
  misc_feature 1..20: note = spacer sequence
  source 1..20: mol_type = other RNA
aataaacactaatgtctaca

SEQ ID NO: 7174 - RNA, 20 nt, synthetic construct
  misc_feature 1..20: note = spacer sequence
  source 1..20: mol_type = other RNA
acaaaacaaagatccataca

SEQ ID NO: 7175 - RNA, 20 nt, synthetic construct
  misc_feature 1..20: note = spacer sequence
  source 1..20: mol_type = other RNA
ttgttttgtagacattagtg

SEQ ID NO: 7176 - RNA, 20 nt, synthetic construct
  misc_feature 1..20: note = spacer sequence
  source 1..20: mol_type = other RNA
atacacaaatgtgaagttta

SEQ ID NO: 7177 - RNA, 20 nt, synthetic construct
  misc_feature 1..20: note = spacer sequence
  source 1..20: mol_type = other RNA
catttgtgtatggatctttg

SEQ ID NO: 7178 - RNA, 20 nt, synthetic construct
  misc_feature 1..20: note = spacer sequence
  source 1..20: mol_type = other RNA
tttttcaaggcacagcatga

SEQ ID NO: 7179 - RNA, 20 nt, synthetic construct
  misc_feature 1..20: note = spacer sequence
  source 1..20: mol_type = other RNA
aggcacagcatgatatttaa

SEQ ID NO: 7180 - RNA, 20 nt, synthetic construct
  misc_feature 1..20: note = spacer sequence
  source 1..20: mol_type = other RNA
tgctgtgccttgaaaaagga

SEQ ID NO: 7181 - RNA, 20 nt, synthetic construct
  misc_feature 1..20: note = spacer sequence
  source 1..20: mol_type = other RNA
caagttaaatatcatgctgt

SEQ ID NO: 7182 - RNA, 20 nt, synthetic construct
  misc_feature 1..20: note = spacer sequence
  source 1..20: mol_type = other RNA
cgacctgaataatgctcaat

SEQ ID NO: 7183 - RNA, 20 nt, synthetic construct
  misc_feature 1..20: note = spacer sequence
  source 1..20: mol_type = other RNA
tgatggcctcgcaagttaaa

SEQ ID NO: 7184 - RNA, 20 nt, synthetic construct
  misc_feature 1..20: note = spacer sequence
  source 1..20: mol_type = other RNA
ggtcgtgatggcctcgcaag

SEQ ID NO: 7185 - RNA, 20 nt, synthetic construct
  misc_feature 1..20: note = spacer sequence
  source 1..20: mol_type = other RNA
atgttcagctgttcaccttc

SEQ ID NO: 7186 - RNA, 20 nt, synthetic construct
  misc_feature 1..20: note = spacer sequence
  source 1..20: mol_type = other RNA
gctgttcaccttctattcat

SEQ ID NO: 7187 - RNA, 20 nt, synthetic construct
  misc_feature 1..20: note = spacer sequence
  source 1..20: mol_type = other RNA
ccttctattcattatttcta

SEQ ID NO: 7188 - RNA, 20 nt, synthetic construct
  misc_feature 1..20: note = spacer sequence
  source 1..20: mol_type = other RNA
attcattatttctattcatt

SEQ ID NO: 7189 - RNA, 20 nt, synthetic construct
  misc_feature 1..20: note = spacer sequence
  source 1..20: mol_type = other RNA
ttatttctattcattcttcc

SEQ ID NO: 7190 - RNA, 20 nt, synthetic construct
  misc_feature 1..20: note = spacer sequence
  source 1..20: mol_type = other RNA
attcattcttccaaaggtgg

SEQ ID NO: 7191 - RNA, 20 nt, synthetic construct
  misc_feature 1..20: note = spacer sequence
  source 1..20: mol_type = other RNA
ttcttccaaaggtggcaagt

SEQ ID NO: 7192 - RNA, 20 nt, synthetic construct
  misc_feature 1..20: note = spacer sequence
  source 1..20: mol_type = other RNA
tccaaaggtggcaagtctgg

SEQ ID NO: 7193 - RNA, 20 nt, synthetic construct
  misc_feature 1..20: note = spacer sequence
  source 1..20: mol_type = other RNA
aaaggtggcaagtctggtaa

SEQ ID NO: 7194 - RNA, 20 nt, synthetic construct
  misc_feature 1..20: note = spacer sequence
  source 1..20: mol_type = other RNA
ggtaaggttggtgctgctga

SEQ ID NO: 7195 - RNA, 20 nt, synthetic construct
  misc_feature 1..20: note = spacer sequence
  source 1..20: mol_type = other RNA
gcagcaccaaccttaccaga

SEQ ID NO: 7196 - RNA, 20 nt, synthetic construct
  misc_feature 1..20: note = spacer sequence
  source 1..20: mol_type = other RNA
ttgttatttcagcagcacca

SEQ ID NO: 7197 - RNA, 20 nt, synthetic construct
  misc_feature 1..20: note = spacer sequence
  source 1..20: mol_type = other RNA
tggttttattttcctatcta

SEQ ID NO: 7198 - RNA, 20 nt, synthetic construct
  misc_feature 1..20: note = spacer sequence
  source 1..20: mol_type = other RNA
tatctacatgagggtttgct

SEQ ID NO: 7199 - RNA, 20 nt, synthetic construct
  misc_feature 1..20: note = spacer sequence
  source 1..20: mol_type = other RNA
acatgagggtttgctcatac

SEQ ID NO: 7200 - RNA, 20 nt, synthetic construct
  misc_feature 1..20: note = spacer sequence
  source 1..20: mol_type = other RNA
tgtagataggaaaataaaac

SEQ ID NO: 7201 - RNA, 20 nt, synthetic construct
  misc_feature 1..20: note = spacer sequence
  source 1..20: mol_type = other RNA
tactgatataagagtcacgc

SEQ ID NO: 7202 - RNA, 20 nt, synthetic construct
  misc_feature 1..20: note = spacer sequence
  source 1..20: mol_type = other RNA
gtatgagcaaaccctcatgt

SEQ ID NO: 7203 - RNA, 20 nt, synthetic construct
  misc_feature 1..20: note = spacer sequence
  source 1..20: mol_type = other RNA
tatatcagtatgagcaaacc

SEQ ID NO: 7204 - RNA, 20 nt, synthetic construct
  misc_feature 1..20: note = spacer sequence
  source 1..20: mol_type = other RNA
cgcaagttcaacaacctgtc

SEQ ID NO: 7205 - RNA, 20 nt, synthetic construct
  misc_feature 1..20: note = spacer sequence
  source 1..20: mol_type = other RNA
acaacctgtcattttctgct

SEQ ID NO: 7206 - RNA, 20 nt, synthetic construct
  misc_feature 1..20: note = spacer sequence
  source 1..20: mol_type = other RNA
ttttctgcttggggttcacc

SEQ ID NO: 7207 - RNA, 20 nt, synthetic construct
  misc_feature 1..20: note = spacer sequence
  source 1..20: mol_type = other RNA
gcttggggttcaccacttag

SEQ ID NO: 7208 - RNA, 20 nt, synthetic construct
  misc_feature 1..20: note = spacer sequence
  source 1..20: mol_type = other RNA
ccacttaggtacagaaaagc

SEQ ID NO: 7209 - RNA, 20 nt, synthetic construct
  misc_feature 1..20: note = spacer sequence
  source 1..20: mol_type = other RNA
gtacctaagtggtgaacccc

SEQ ID NO: 7210 - RNA, 20 nt, synthetic construct
  misc_feature 1..20: note = spacer sequence
  source 1..20: mol_type = other RNA
aatgcttttctgtacctaag

SEQ ID NO: 7211 - RNA, 20 nt, synthetic construct
  misc_feature 1..20: note = spacer sequence
  source 1..20: mol_type = other RNA
ctcaatttatccttttgcaa

SEQ ID NO: 7212 - RNA, 20 nt, synthetic construct
  misc_feature 1..20: note = spacer sequence
  source 1..20: mol_type = other RNA
caatttatccttttgcaaat

SEQ ID NO: 7213 - RNA, 20 nt, synthetic construct
  misc_feature 1..20: note = spacer sequence
  source 1..20: mol_type = other RNA
atttatccttttgcaaatat

SEQ ID NO: 7214 - RNA, 20 nt, synthetic construct
  misc_feature 1..20: note = spacer sequence
  source 1..20: mol_type = other RNA
ttttgcaaatataaataaga

SEQ ID NO: 7215 - RNA, 20 nt, synthetic construct
  misc_feature 1..20: note = spacer sequence
  source 1..20: mol_type = other RNA
tatttatatttgcaaaagga

SEQ ID NO: 7216 - RNA, 20 nt, synthetic construct
  misc_feature 1..20: note = spacer sequence
  source 1..20: mol_type = other RNA
tagtattatagtatttgtct

SEQ ID NO: 7217 - RNA, 20 nt, synthetic construct
  misc_feature 1..20: note = spacer sequence
  source 1..20: mol_type = other RNA
atcatagtattatagtattt

SEQ ID NO: 7218 - RNA, 20 nt, synthetic construct
  misc_feature 1..20: note = spacer sequence
  source 1..20: mol_type = other RNA
tttcaatcatagtattatag

SEQ ID NO: 7219 - RNA, 20 nt, synthetic construct
  misc_feature 1..20: note = spacer sequence
  source 1..20: mol_type = other RNA
gataatggaaaatgttccag

SEQ ID NO: 7220 - RNA, 20 nt, synthetic construct
  misc_feature 1..20: note = spacer sequence
  source 1..20: mol_type = other RNA
gaataactcctttcaatcat

SEQ ID NO: 7221 - RNA, 20 nt, synthetic construct
  misc_feature 1..20: note = spacer sequence
  source 1..20: mol_type = other RNA
attatcagaataactccttt

SEQ ID NO: 7222 - RNA, 20 nt, synthetic construct
  misc_feature 1..20: note = spacer sequence
  source 1..20: mol_type = other RNA
aggtactgttaagaacatgc

SEQ ID NO: 7223 - RNA, 20 nt, synthetic construct
  misc_feature 1..20: note = spacer sequence
  source 1..20: mol_type = other RNA
taacagtacctggaacattt

SEQ ID NO: 7224 - RNA, 20 nt, synthetic construct
  misc_feature 1..20: note = spacer sequence
  source 1..20: mol_type = other RNA
gcagcacatgggtaaatagc

SEQ ID NO: 7225 - RNA, 20 nt, synthetic construct
  misc_feature 1..20: note = spacer sequence
  source 1..20: mol_type = other RNA
ttgagcaagttatgggttat

SEQ ID NO: 7226 - RNA, 20 nt, synthetic construct
  misc_feature 1..20: note = spacer sequence
  source 1..20: mol_type = other RNA
aagacctttctgcagcacat

SEQ ID NO: 7227 - RNA, 20 nt, synthetic construct
  misc_feature 1..20: note = spacer sequence
  source 1..20: mol_type = other RNA
taacccataacttgctcaaa

SEQ ID NO: 7228 - RNA, 20 nt, synthetic construct
  misc_feature 1..20: note = spacer sequence
  source 1..20: mol_type = other RNA
gttagcaatggtaagaaaaa

SEQ ID NO: 7229 - RNA, 20 nt, synthetic construct
  misc_feature 1..20: note = spacer sequence
  source 1..20: mol_type = other RNA
taccattgctaactgatcat

SEQ ID NO: 7230 - RNA, 20 nt, synthetic construct
  misc_feature 1..20: note = spacer sequence
  source 1..20: mol_type = other RNA
cccaagtatttttcttacca

SEQ ID NO: 7231 - RNA, 20 nt, synthetic construct
  misc_feature 1..20: note = spacer sequence
  source 1..20: mol_type = other RNA
gtgtcacccaagtatttttc

SEQ ID NO: 7232 - RNA, 20 nt, synthetic construct
  misc_feature 1..20: note = spacer sequence
  source 1..20: mol_type = other RNA
gtcagtgtcacccaagtatt

SEQ ID NO: 7233 - RNA, 20 nt, synthetic construct
  misc_feature 1..20: note = spacer sequence
  source 1..20: mol_type = other RNA
tttttctgtcagtgtcaccc

SEQ ID NO: 7234 - RNA, 20 nt, synthetic construct
  misc_feature 1..20: note = spacer sequence
  source 1..20: mol_type = other RNA
caattggtcatttttctgtc

SEQ ID NO: 7235 - RNA, 20 nt, synthetic construct
  misc_feature 1..20: note = spacer sequence
  source 1..20: mol_type = other RNA
gcatttcccaattggtcatt

SEQ ID NO: 7236 - RNA, 20 nt, synthetic construct
  misc_feature 1..20: note = spacer sequence
  source 1..20: mol_type = other RNA
ggcgcttttgctgtggtaat

SEQ ID NO: 7237 - RNA, 20 nt, synthetic construct
  misc_feature 1..20: note = spacer sequence
  source 1..20: mol_type = other RNA
caatttctggcgcttttgct

SEQ ID NO: 7238 - RNA, 20 nt, synthetic construct
  misc_feature 1..20: note = spacer sequence
  source 1..20: mol_type = other RNA
atttcacaatttctggcgct

SEQ ID NO: 7239 - RNA, 20 nt, synthetic construct
  misc_feature 1..20: note = spacer sequence
  source 1..20: mol_type = other RNA
tccatttcacaatttctggc

SEQ ID NO: 7240 - RNA, 20 nt, synthetic construct
  misc_feature 1..20: note = spacer sequence
  source 1..20: mol_type = other RNA
cctcatccatttcacaattt

SEQ ID NO: 7241 - RNA, 20 nt, synthetic construct
  misc_feature 1..20: note = spacer sequence
  source 1..20: mol_type = other RNA
gtcccttcacaggctcttca

SEQ ID NO: 7242 - RNA, 20 nt, synthetic construct
  misc_feature 1..20: note = spacer sequence
  source 1..20: mol_type = other RNA
cttcacaggctcttcagaca

SEQ ID NO: 7243 - RNA, 20 nt, synthetic construct
  misc_feature 1..20: note = spacer sequence
  source 1..20: mol_type = other RNA
caggctcttcagacactttg

SEQ ID NO: 7244 - RNA, 20 nt, synthetic construct
  misc_feature 1..20: note = spacer sequence
  source 1..20: mol_type = other RNA
tcagacactttgggaaaatc

SEQ ID NO: 7245 - RNA, 20 nt, synthetic construct
  misc_feature 1..20: note = spacer sequence
  source 1..20: mol_type = other RNA
gacactttgggaaaatccca

SEQ ID NO: 7246 - RNA, 20 nt, synthetic construct
  misc_feature 1..20: note = spacer sequence
  source 1..20: mol_type = other RNA
gaagagcctgtgaagggaca

SEQ ID NO: 7247 - RNA, 20 nt, synthetic construct
  misc_feature 1..20: note = spacer sequence
  source 1..20: mol_type = other RNA
caaagtgtctgaagagcctg

SEQ ID NO: 7248 - RNA, 20 nt, synthetic construct
  misc_feature 1..20: note = spacer sequence
  source 1..20: mol_type = other RNA
caatgaacaagtacaggaca

SEQ ID NO: 7249 - RNA, 20 nt, synthetic construct
  misc_feature 1..20: note = spacer sequence
  source 1..20: mol_type = other RNA
ttgggattttcccaaagtgt

SEQ ID NO: 7250 - RNA, 20 nt, synthetic construct
  misc_feature 1..20: note = spacer sequence
  source 1..20: mol_type = other RNA
tgtacttgttcattgggatt

SEQ ID NO: 7251 - RNA, 20 nt, synthetic construct
  misc_feature 1..20: note = spacer sequence
  source 1..20: mol_type = other RNA
cagatagaaataaaacactc

SEQ ID NO: 7252 - RNA, 20 nt, synthetic construct
  misc_feature 1..20: note = spacer sequence
  source 1..20: mol_type = other RNA
gatagaaataaaacactctt

SEQ ID NO: 7253 - RNA, 20 nt, synthetic construct
  misc_feature 1..20: note = spacer sequence
  source 1..20: mol_type = other RNA
gagatacagtgtagctggtg

SEQ ID NO: 7254 - RNA, 20 nt, synthetic construct
  misc_feature 1..20: note = spacer sequence
  source 1..20: mol_type = other RNA
atctgagatacagtgtagct

SEQ ID NO: 7255 - RNA, 20 nt, synthetic construct
  misc_feature 1..20: note = spacer sequence
  source 1..20: mol_type = other RNA
tcacatcatttgggaaatat

SEQ ID NO: 7256 - RNA, 20 nt, synthetic construct
  misc_feature 1..20: note = spacer sequence
  source 1..20: mol_type = other RNA
catcatttgggaaatattta

SEQ ID NO: 7257 - RNA, 20 nt, synthetic construct
  misc_feature 1..20: note = spacer sequence
  source 1..20: mol_type = other RNA
tttgggaaatatttaccgag

SEQ ID NO: 7258 - RNA, 20 nt, synthetic construct
  misc_feature 1..20: note = spacer sequence
  source 1..20: mol_type = other RNA
caaatgatgtgaagagtgtt

SEQ ID NO: 7259 - RNA, 20 nt, synthetic construct
  misc_feature 1..20: note = spacer sequence
  source 1..20: mol_type = other RNA
gtaaatatttcccaaatgat

SEQ ID NO: 7260 - RNA, 20 nt, synthetic construct
  misc_feature 1..20: note = spacer sequence
  source 1..20: mol_type = other RNA
gttgccccagtgtatggtat

SEQ ID NO: 7261 - RNA, 20 nt, synthetic construct
  misc_feature 1..20: note = spacer sequence
  source 1..20: mol_type = other RNA
ttgctttcactttgtaaaga

SEQ ID NO: 7262 - RNA, 20 nt, synthetic construct
  misc_feature 1..20: note = spacer sequence
  source 1..20: mol_type = other RNA
ctttgtaaagaaatagtgta

SEQ ID NO: 7263 - RNA, 20 nt, synthetic construct
  misc_feature 1..20: note = spacer sequence
  source 1..20: mol_type = other RNA
ttacaaagtgaaagcaagga

SEQ ID NO: 7264 - RNA, 20 nt, synthetic construct
  misc_feature 1..20: note = spacer sequence
  source 1..20: mol_type = other RNA
aacacctgtggactttaatc

SEQ ID NO: 7265 - RNA, 20 nt, synthetic construct
  misc_feature 1..20: note = spacer sequence
  source 1..20: mol_type = other RNA
acaggtgttggaactacact

SEQ ID NO: 7266 - RNA, 20 nt, synthetic construct
  misc_feature 1..20: note = spacer sequence
  source 1..20: mol_type = other RNA
aaaacataaaatgtatatgc

SEQ ID NO: 7267 - RNA, 20 nt, synthetic construct
  misc_feature 1..20: note = spacer sequence
  source 1..20: mol_type = other RNA
cttttaatagagggatcatt

SEQ ID NO: 7268 - RNA, 20 nt, synthetic construct
  misc_feature 1..20: note = spacer sequence
  source 1..20: mol_type = other RNA
tttaatagagggatcattat

SEQ ID NO: 7269 - RNA, 20 nt, synthetic construct
  misc_feature 1..20: note = spacer sequence
  source 1..20: mol_type = other RNA
attaaaagagactgtgcctg

SEQ ID NO: 7270 - RNA, 20 nt, synthetic construct
  misc_feature 1..20: note = spacer sequence
  source 1..20: mol_type = other RNA
ctctattaaaagagactgtg

SEQ ID NO: 7271 - RNA, 20 nt, synthetic construct
  misc_feature 1..20: note = spacer sequence
  source 1..20: mol_type = other RNA
ttatatagaaacacctgaaa

SEQ ID NO: 7272 - RNA, 20 nt, synthetic construct
  misc_feature 1..20: note = spacer sequence
  source 1..20: mol_type = other RNA
atataatgatccctctatta

SEQ ID NO: 7273 - RNA, 20 nt, synthetic construct
  misc_feature 1..20: note = spacer sequence
  source 1..20: mol_type = other RNA
ggtgtttctatataatgatc

SEQ ID NO: 7274 - RNA, 20 nt, synthetic construct
  misc_feature 1..20: note = spacer sequence
  source 1..20: mol_type = other RNA
gtttgtttcaggtgtttcta

SEQ ID NO: 7275 - RNA, 20 nt, synthetic construct
  misc_feature 1..20: note = spacer sequence
  source 1..20: mol_type = other RNA
cattaccttttatcagtaaa

SEQ ID NO: 7276 - RNA, 20 nt, synthetic construct
  misc_feature 1..20: note = spacer sequence
  source 1..20: mol_type = other RNA
gtaaagatttgttttccagg

SEQ ID NO: 7277 - RNA, 20 nt, synthetic construct
  misc_feature 1..20: note = spacer sequence
  source 1..20: mol_type = other RNA
ttactgataaaaggtaatgg

SEQ ID NO: 7278 - RNA, 20 nt, synthetic construct
  misc_feature 1..20: note = spacer sequence
  source 1..20: mol_type = other RNA
aggactaaaatgaccaatgt

SEQ ID NO: 7279 - RNA, 20 nt, synthetic construct
  misc_feature 1..20: note = spacer sequence
  source 1..20: mol_type = other RNA
tggaaaacaaatctttactg

SEQ ID NO: 7280 - RNA, 20 nt, synthetic construct
  misc_feature 1..20: note = spacer sequence
  source 1..20: mol_type = other RNA
ttttagtcctggaaaacaaa

SEQ ID NO: 7281 - RNA, 20 nt, synthetic construct
  misc_feature 1..20: note = spacer sequence
  source 1..20: mol_type = other RNA
gttaacagtaaacattggtc

SEQ ID NO: 7282 - RNA, 20 nt, synthetic construct
  misc_feature 1..20: note = spacer sequence
  source 1..20: mol_type = other RNA
gcatagaacattctggtgcc

SEQ ID NO: 7283 - RNA, 20 nt, synthetic construct
  misc_feature 1..20: note = spacer sequence
  source 1..20: mol_type = other RNA
atgctgacctccgttaacag

SEQ ID NO: 7284 - RNA, 20 nt, synthetic construct
  misc_feature 1..20: note = spacer sequence
  source 1..20: mol_type = other RNA
ggtgcctatctataggttca

SEQ ID NO: 7285 - RNA, 20 nt, synthetic construct
  misc_feature 1..20: note = spacer sequence
  source 1..20: mol_type = other RNA
ataggttcaagtggccaagc

SEQ ID NO: 7286 - RNA, 20 nt, synthetic construct
  misc_feature 1..20: note = spacer sequence
  source 1..20: mol_type = other RNA
agtggccaagccaaattata

SEQ ID NO: 7287 - RNA, 20 nt, synthetic construct
  misc_feature 1..20: note = spacer sequence
  source 1..20: mol_type = other RNA
ggtgttatattataatttgg

SEQ ID NO: 7288 - RNA, 20 nt, synthetic construct
  misc_feature 1..20: note = spacer sequence
  source 1..20: mol_type = other RNA
cccgtttttctggtgttata

SEQ ID NO: 7289 - RNA, 20 nt, synthetic construct
  misc_feature 1..20: note = spacer sequence
  source 1..20: mol_type = other RNA
aagcatcttattataacaag

SEQ ID NO: 7290 - RNA, 20 nt, synthetic construct
  misc_feature 1..20: note = spacer sequence
  source 1..20: mol_type = other RNA
tattataacaagagaattta

SEQ ID NO: 7291 - RNA, 20 nt, synthetic construct
  misc_feature 1..20: note = spacer sequence
  source 1..20: mol_type = other RNA
tgttataataagatgctttg

SEQ ID NO: 7292 - RNA, 20 nt, synthetic construct
  misc_feature 1..20: note = spacer sequence
  source 1..20: mol_type = other RNA
cttgttataataagatgctt

SEQ ID NO: 7293 - RNA, 20 nt, synthetic construct
  misc_feature 1..20: note = spacer sequence
  source 1..20: mol_type = other RNA
actaaattctcttgttataa

SEQ ID NO: 7294 - RNA, 20 nt, synthetic construct
  misc_feature 1..20: note = spacer sequence
  source 1..20: mol_type = other RNA
caactaaattctcttgttat

SEQ ID NO: 7295 - RNA, 20 nt, synthetic construct
  misc_feature 1..20: note = spacer sequence
  source 1..20: mol_type = other RNA
tctcaactaaattctcttgt

SEQ ID NO: 7296 - RNA, 20 nt, synthetic construct
  misc_feature 1..20: note = spacer sequence
  source 1..20: mol_type = other RNA
tcaaaaggaaagtgattcct

SEQ ID NO: 7297 - RNA, 20 nt, synthetic construct
  misc_feature 1..20: note = spacer sequence
  source 1..20: mol_type = other RNA
aaaggaaagtgattcctgaa

SEQ ID NO: 7298 - RNA, 20 nt, synthetic construct
  misc_feature 1..20: note = spacer sequence
  source 1..20: mol_type = other RNA
ttttgaagactcatctcaac

SEQ ID NO: 7299 - RNA, 20 nt, synthetic construct
  misc_feature 1..20: note = spacer sequence
  source 1..20: mol_type = other RNA
ctttccttttgaagactcat

SEQ ID NO: 7300 - RNA, 20 nt, synthetic construct
  misc_feature 1..20: note = spacer sequence
  source 1..20: mol_type = other RNA
tgaagggcaatgggaaggtc

SEQ ID NO: 7301 - RNA, 20 nt, synthetic construct
  misc_feature 1..20: note = spacer sequence
  source 1..20: mol_type = other RNA
ggaatcactttccttttgaa

SEQ ID NO: 7302 - RNA, 20 nt, synthetic construct
  misc_feature 1..20: note = spacer sequence
  source 1..20: mol_type = other RNA
cattgcccttcaggaatcac

SEQ ID NO: 7303 - RNA, 20 nt, synthetic construct
  misc_feature 1..20: note = spacer sequence
  source 1..20: mol_type = other RNA
tactcctgatgccccattga

SEQ ID NO: 7304 - RNA, 20 nt, synthetic construct
  misc_feature 1..20: note = spacer sequence
  source 1..20: mol_type = other RNA
tgatgccccattgacttggc

SEQ ID NO: 7305 - RNA, 20 nt, synthetic construct
  misc_feature 1..20: note = spacer sequence
  source 1..20: mol_type = other RNA
ggagtaggaccttcccattg

SEQ ID NO: 7306 - RNA, 20 nt, synthetic construct
  misc_feature 1..20: note = spacer sequence
  source 1..20: mol_type = other RNA
atggggcatcaggagtagga

SEQ ID NO: 7307 - RNA, 20 nt, synthetic construct
  misc_feature 1..20: note = spacer sequence
  source 1..20: mol_type = other RNA
tcaagtatctgacagtggcc

SEQ ID NO: 7308 - RNA, 20 nt, synthetic construct
  misc_feature 1..20: note = spacer sequence
  source 1..20: mol_type = other RNA
agtatctgacagtggccaaa

SEQ ID NO: 7309 - RNA, 20 nt, synthetic construct
  misc_feature 1..20: note = spacer sequence
  source 1..20: mol_type = other RNA
gacagtggccaaaggatgca

SEQ ID NO: 7310 - RNA, 20 nt, synthetic construct
  misc_feature 1..20: note = spacer sequence
  source 1..20: mol_type = other RNA
gatacttgaggaagccaagt

SEQ ID NO: 7311 - RNA, 20 nt, synthetic construct
  misc_feature 1..20: note = spacer sequence
  source 1..20: mol_type = other RNA
tttggccactgtcagatact

SEQ ID NO: 7312 - RNA, 20 nt, synthetic construct
  misc_feature 1..20: note = spacer sequence
  source 1..20: mol_type = other RNA
actttgtacagaagagagaa

SEQ ID NO: 7313 - RNA, 20 nt, synthetic construct
  misc_feature 1..20: note = spacer sequence
  source 1..20: mol_type = other RNA
gtacaaagttgaggtggctt

SEQ ID NO: 7314 - RNA, 20 nt, synthetic construct
  misc_feature 1..20: note = spacer sequence
  source 1..20: mol_type = other RNA
tctgtacaaagttgaggtgg

SEQ ID NO: 7315 - RNA, 20 nt, synthetic construct
  misc_feature 1..20: note = spacer sequence
  source 1..20: mol_type = other RNA
cttctgtacaaagttgaggt

SEQ ID NO: 7316 - RNA, 20 nt, synthetic construct
  misc_feature 1..20: note = spacer sequence
  source 1..20: mol_type = other RNA
ctcttctgtacaaagttgag

SEQ ID NO: 7317 - RNA, 20 nt, synthetic construct
  misc_feature 1..20: note = spacer sequence
  source 1..20: mol_type = other RNA
gggcccattttctctcttct

SEQ ID NO: 7318 - RNA, 20 nt, synthetic construct
  misc_feature 1..20: note = spacer sequence
  source 1..20: mol_type = other RNA
tcagggcccattttctctct

SEQ ID NO: 7319 - RNA, 20 nt, synthetic construct
  misc_feature 1..20: note = spacer sequence
  source 1..20: mol_type = other RNA
ggggtttgtattttatcatc

SEQ ID NO: 7320 - RNA, 20 nt, synthetic construct
  misc_feature 1..20: note = spacer sequence
  source 1..20: mol_type = other RNA
gtctggggtttgtattttat

SEQ ID NO: 7321 - RNA, 20 nt, synthetic construct
  misc_feature 1..20: note = spacer sequence
  source 1..20: mol_type = other RNA
ttcagtctggggtttgtatt

SEQ ID NO: 7322 - RNA, 20 nt, synthetic construct
  misc_feature 1..20: note = spacer sequence
  source 1..20: mol_type = other RNA
cttaagtactttacagcatt

SEQ ID NO: 7323 - RNA, 20 nt, synthetic construct
  misc_feature 1..20: note = spacer sequence
  source 1..20: mol_type = other RNA
taagtactttacagcattca

SEQ ID NO: 7324 - RNA, 20 nt, synthetic construct
  misc_feature 1..20: note = spacer sequence
  source 1..20: mol_type = other RNA
tttgagggtataaattaaca

SEQ ID NO: 7325 - RNA, 20 nt, synthetic construct
  misc_feature 1..20: note = spacer sequence
  source 1..20: mol_type = other RNA
aatgaatgctgtaaagtact

SEQ ID NO: 7326 - RNA, 20 nt, synthetic construct
  misc_feature 1..20: note = spacer sequence
  source 1..20: mol_type = other RNA
tataaaccttatataaaagc

SEQ ID NO: 7327 - RNA, 20 nt, synthetic construct
  misc_feature 1..20: note = spacer sequence
  source 1..20: mol_type = other RNA
ttataaaaattgtgctttta

SEQ ID NO: 7328 - RNA, 20 nt, synthetic construct
  misc_feature 1..20: note = spacer sequence
  source 1..20: mol_type = other RNA
aacaagtaggcaattcttta

SEQ ID NO: 7329 - RNA, 20 nt, synthetic construct
  misc_feature 1..20: note = spacer sequence
  source 1..20: mol_type = other RNA
acatgtatcaaacaagtagg

SEQ ID NO: 7330 - RNA, 20 nt, synthetic construct
  misc_feature 1..20: note = spacer sequence
  source 1..20: mol_type = other RNA
cacacacaaatatccacatg

SEQ ID NO: 7331 - RNA, 20 nt, synthetic construct
  misc_feature 1..20: note = spacer sequence
  source 1..20: mol_type = other RNA
aatcctttcccttcttcgta

SEQ ID NO: 7332 - RNA, 20 nt, synthetic construct
  misc_feature 1..20: note = spacer sequence
  source 1..20: mol_type = other RNA
tttcccttcttcgtaaataa

SEQ ID NO: 7333 - RNA, 20 nt, synthetic construct
  misc_feature 1..20: note = spacer sequence
  source 1..20: mol_type = other RNA
cttcttcgtaaataaagcta

SEQ ID NO: 7334 - RNA, 20 nt, synthetic construct
  misc_feature 1..20: note = spacer sequence
  source 1..20: mol_type = other RNA
tcgtaaataaagctaaaaag

SEQ ID NO: 7335 - RNA, 20 nt, synthetic construct
  misc_feature 1..20: note = spacer sequence
  source 1..20: mol_type = other RNA
taaataaagctaaaaagatg

SEQ ID NO: 7336 - RNA, 20 nt, synthetic construct
  misc_feature 1..20: note = spacer sequence
  source 1..20: mol_type = other RNA
ttttagctttatttacgaag

SEQ ID NO: 7337 - RNA, 20 nt, synthetic construct
  misc_feature 1..20: note = spacer sequence
  source 1..20: mol_type = other RNA
ttttaaccctttgagagcca

SEQ ID NO: 7338 - RNA, 20 nt, synthetic construct
  misc_feature 1..20: note = spacer sequence
  source 1..20: mol_type = other RNA
aagggttaaaaggaaaccca

SEQ ID NO: 7339 - RNA, 20 nt, synthetic construct
  misc_feature 1..20: note = spacer sequence
  source 1..20: mol_type = other RNA
caaagggttaaaaggaaacc

SEQ ID NO: 7340 - RNA, 20 nt, synthetic construct
  misc_feature 1..20: note = spacer sequence
  source 1..20: mol_type = other RNA
ataaatttagttggctctca

SEQ ID NO: 7341 - RNA, 20 nt, synthetic construct
  misc_feature 1..20: note = spacer sequence
  source 1..20: mol_type = other RNA
tgatagaatatgcccatagc

SEQ ID NO: 7342 - RNA, 20 nt, synthetic construct
  misc_feature 1..20: note = spacer sequence
  source 1..20: mol_type = other RNA
ggaatctataaatttagttg

SEQ ID NO: 7343 - RNA, 20 nt, synthetic construct
  misc_feature 1..20: note = spacer sequence
  source 1..20: mol_type = other RNA
atcaggaatctataaattta

SEQ ID NO: 7344 - RNA, 20 nt, synthetic construct
  misc_feature 1..20: note = spacer sequence
  source 1..20: mol_type = other RNA
ggggctatgggcatattcta

SEQ ID NO: 7345 - RNA, 20 nt, synthetic construct
  misc_feature 1..20: note = spacer sequence
  source 1..20: mol_type = other RNA
gaccacaaaaaaaattttat

SEQ ID NO: 7346 - RNA, 20 nt, synthetic construct
  misc_feature 1..20: note = spacer sequence
  source 1..20: mol_type = other RNA
gaaggccatctggggctatg

SEQ ID NO: 7347 - RNA, 20 nt, synthetic construct
  misc_feature 1..20: note = spacer sequence
  source 1..20: mol_type = other RNA
gtagttccttttattccctt

SEQ ID NO: 7348 - RNA, 20 nt, synthetic construct
  misc_feature 1..20: note = spacer sequence
  source 1..20: mol_type = other RNA
ttttattcccttttgcagtg

SEQ ID NO: 7349 - RNA, 20 nt, synthetic construct
  misc_feature 1..20: note = spacer sequence
  source 1..20: mol_type = other RNA
cttttgcagtgaacatgtaa

SEQ ID NO: 7350 - RNA, 20 nt, synthetic construct
  misc_feature 1..20: note = spacer sequence
  source 1..20: mol_type = other RNA
ctgcaaaagggaataaaagg

SEQ ID NO: 7351 - RNA, 20 nt, synthetic construct
  misc_feature 1..20: note = spacer sequence
  source 1..20: mol_type = other RNA
gccacctaatgtgtttttaa

SEQ ID NO: 7352 - RNA, 20 nt, synthetic construct
  misc_feature 1..20: note = spacer sequence
  source 1..20: mol_type = other RNA
tctgccacctaatgtgtttt

SEQ ID NO: 7353 - RNA, 20 nt, synthetic construct
  misc_feature 1..20: note = spacer sequence
  source 1..20: mol_type = other RNA
tagctagcatgcttgccagt

SEQ ID NO: 7354 - RNA, 20 nt, synthetic construct
  misc_feature 1..20: note = spacer sequence
  source 1..20: mol_type = other RNA
ttattaggaaagctggcatt

SEQ ID NO: 7355 - RNA, 20 nt, synthetic construct
  misc_feature 1..20: note = spacer sequence
  source 1..20: mol_type = other RNA
taataaggacttcctagcta

SEQ ID NO: 7356 - RNA, 20 nt, synthetic construct
  misc_feature 1..20: note = spacer sequence
  source 1..20: mol_type = other RNA
gtatattgtgagttacccag

SEQ ID NO: 7357 - RNA, 20 nt, synthetic construct
  misc_feature 1..20: note = spacer sequence
  source 1..20: mol_type = other RNA
caatatactgatggtttatg

SEQ ID NO: 7358 - RNA, 20 nt, synthetic construct
  misc_feature 1..20: note = spacer sequence
  source 1..20: mol_type = other RNA
cctgggtaactcacaatata

SEQ ID NO: 7359 - RNA, 20 nt, synthetic construct
  misc_feature 1..20: note = spacer sequence
  source 1..20: mol_type = other RNA
aagcaattgttcatttcatt

SEQ ID NO: 7360 - RNA, 20 nt, synthetic construct
  misc_feature 1..20: note = spacer sequence
  source 1..20: mol_type = other RNA
tttcatttggaaatatgacg

SEQ ID NO: 7361 - RNA, 20 nt, synthetic construct
  misc_feature 1..20: note = spacer sequence
  source 1..20: mol_type = other RNA
tttggaaatatgacgtgtga

SEQ ID NO: 7362 - RNA, 20 nt, synthetic construct
  misc_feature 1..20: note = spacer sequence
  source 1..20: mol_type = other RNA
aaatgaaatgaacaattgct

SEQ ID NO: 7363 - RNA, 20 nt, synthetic construct
  misc_feature 1..20: note = spacer sequence
  source 1..20: mol_type = other RNA
tatttccaaatgaaatgaac

SEQ ID NO: 7364 - RNA, 20 nt, synthetic construct
  misc_feature 1..20: note = spacer sequence
  source 1..20: mol_type = other RNA
cacgtcatatttccaaatga

SEQ ID NO: 7365 - RNA, 20 nt, synthetic construct
  misc_feature 1..20: note = spacer sequence
  source 1..20: mol_type = other RNA
ctgatgagttttctaaagtt

SEQ ID NO: 7366 - RNA, 20 nt, synthetic construct
  misc_feature 1..20: note = spacer sequence
  source 1..20: mol_type = other RNA
gtgatatcacacgtcatatt

SEQ ID NO: 7367 - RNA, 20 nt, synthetic construct
  misc_feature 1..20: note = spacer sequence
  source 1..20: mol_type = other RNA
tcagtgatatcacacgtcat

SEQ ID NO: 7368 - RNA, 20 nt, synthetic construct
  misc_feature 1..20: note = spacer sequence
  source 1..20: mol_type = other RNA
aaagttataaatttttaaaa

SEQ ID NO: 7369 - RNA, 20 nt, synthetic construct
  misc_feature 1..20: note = spacer sequence
  source 1..20: mol_type = other RNA
ttcatattatgtattaaata

SEQ ID NO: 7370 - RNA, 20 nt, synthetic construct
  misc_feature 1..20: note = spacer sequence
  source 1..20: mol_type = other RNA
tattatgtattaaatatctg

SEQ ID NO: 7371 - RNA, 20 nt, synthetic construct
  misc_feature 1..20: note = spacer sequence
  source 1..20: mol_type = other RNA
gaattttctattaactcatt

SEQ ID NO: 7372 - RNA, 20 nt, synthetic construct
  misc_feature 1..20: note = spacer sequence
  source 1..20: mol_type = other RNA
gatatttaatacataatatg

SEQ ID NO: 7373 - RNA, 20 nt, synthetic construct
  misc_feature 1..20: note = spacer sequence
  source 1..20: mol_type = other RNA
attaactcatttaatagtcc

SEQ ID NO: 7374 - RNA, 20 nt, synthetic construct
  misc_feature 1..20: note = spacer sequence
  source 1..20: mol_type = other RNA
tttaatagtcctttccttca

SEQ ID NO: 7375 - RNA, 20 nt, synthetic construct
  misc_feature 1..20: note = spacer sequence
  source 1..20: mol_type = other RNA
tttccttcaaaagggacagt

SEQ ID NO: 7376 - RNA, 20 nt, synthetic construct
  misc_feature 1..20: note = spacer sequence
  source 1..20: mol_type = other RNA
ttcaaaagggacagtttggt

SEQ ID NO: 7377 - RNA, 20 nt, synthetic construct
  misc_feature 1..20: note = spacer sequence
  source 1..20: mol_type = other RNA
aaagggacagtttggtagaa

SEQ ID NO: 7378 - RNA, 20 nt, synthetic construct
  misc_feature 1..20: note = spacer sequence
  source 1..20: mol_type = other RNA
cttttgaaggaaaggactat

SEQ ID NO: 7379 - RNA, 20 nt, synthetic construct
  misc_feature 1..20: note = spacer sequence
  source 1..20: mol_type = other RNA
accaaactgtcccttttgaa

SEQ ID NO: 7380 - RNA, 20 nt, synthetic construct
  misc_feature 1..20: note = spacer sequence
  source 1..20: mol_type = other RNA
atttctaccaaactgtccct

SEQ ID NO: 7381 - RNA, 20 nt, synthetic construct
  misc_feature 1..20: note = spacer sequence
  source 1..20: mol_type = other RNA
attgctgtaggagatggcac

SEQ ID NO: 7382 - RNA, 20 nt, synthetic construct
  misc_feature 1..20: note = spacer sequence
  source 1..20: mol_type = other RNA
tacagcaattgaaatttgtc

SEQ ID NO: 7383 - RNA, 20 nt, synthetic construct
  misc_feature 1..20: note = spacer sequence
  source 1..20: mol_type = other RNA
cctacagcaattgaaatttg

SEQ ID NO: 7384 - RNA, 20 nt, synthetic construct
  misc_feature 1..20: note = spacer sequence
  source 1..20: mol_type = other RNA
ataccaccatgctagcttgt

SEQ ID NO: 7385 - RNA, 20 nt, synthetic construct
  misc_feature 1..20: note = spacer sequence
  source 1..20: mol_type = other RNA
cacctctataccaccatgct

SEQ ID NO: 7386 - RNA, 20 nt, synthetic construct
  misc_feature 1..20: note = spacer sequence
  source 1..20: mol_type = other RNA
taaagctggtgtgtgaatct

SEQ ID NO: 7387 - RNA, 20 nt, synthetic construct
  misc_feature 1..20: note = spacer sequence
  source 1..20: mol_type = other RNA
cacaccagctttatgagtcc

SEQ ID NO: 7388 - RNA, 20 nt, synthetic construct
  misc_feature 1..20: note = spacer sequence
  source 1..20: mol_type = other RNA
gagtggcagtcatcgggggt

SEQ ID NO: 7389 - RNA, 20 nt, synthetic construct
  misc_feature 1..20: note = spacer sequence
  source 1..20: mol_type = other RNA
gattcacacaccagctttat

SEQ ID NO: 7390 - RNA, 20 nt, synthetic construct
  misc_feature 1..20: note = spacer sequence
  source 1..20: mol_type = other RNA
tcgggggtgtctgaattgga

SEQ ID NO: 7391 - RNA, 20 nt, synthetic construct
  misc_feature 1..20: note = spacer sequence
  source 1..20: mol_type = other RNA
ggggtgtctgaattggatct

SEQ ID NO: 7392 - RNA, 20 nt, synthetic construct
  misc_feature 1..20: note = spacer sequence
  source 1..20: mol_type = other RNA
gaattggatctcaaaggaaa

SEQ ID NO: 7393 - RNA, 20 nt, synthetic construct
  misc_feature 1..20: note = spacer sequence
  source 1..20: mol_type = other RNA
gacacccccgatgactgcca

SEQ ID NO: 7394 - RNA, 20 nt, synthetic construct
  misc_feature 1..20: note = spacer sequence
  source 1..20: mol_type = other RNA
aattcagacacccccgatga

SEQ ID NO: 7395 - RNA, 20 nt, synthetic construct
  misc_feature 1..20: note = spacer sequence
  source 1..20: mol_type = other RNA
caaaggaaaatgcacaaggc

SEQ ID NO: 7396 - RNA, 20 nt, synthetic construct
  misc_feature 1..20: note = spacer sequence
  source 1..20: mol_type = other RNA
aaggaaaatgcacaaggcca

SEQ ID NO: 7397 - RNA, 20 nt, synthetic construct
  misc_feature 1..20: note = spacer sequence
  source 1..20: mol_type = other RNA
tttgagatccaattcagaca

SEQ ID NO: 7398 - RNA, 20 nt, synthetic construct
  misc_feature 1..20: note = spacer sequence
  source 1..20: mol_type = other RNA
ctggccttgtgcattttcct

SEQ ID NO: 7399 - RNA, 20 nt, synthetic construct
  misc_feature 1..20: note = spacer sequence
  source 1..20: mol_type = other RNA
ttaactcactggccttgtgc

SEQ ID NO: 7400 - RNA, 20 nt, synthetic construct
  misc_feature 1..20: note = spacer sequence
  source 1..20: mol_type = other RNA
ttccttaactcactggcctt

SEQ ID NO: 7401 - RNA, 20 nt, synthetic construct
  misc_feature 1..20: note = spacer sequence
  source 1..20: mol_type = other RNA
agacattactagcagctttt

SEQ ID NO: 7402 - RNA, 20 nt, synthetic construct
  misc_feature 1..20: note = spacer sequence
  source 1..20: mol_type = other RNA
tgatagtaacgtccttcctt

SEQ ID NO: 7403 - RNA, 20 nt, synthetic construct
  misc_feature 1..20: note = spacer sequence
  source 1..20: mol_type = other RNA
aaagctgctagtaatgtctt

SEQ ID NO: 7404 - RNA, 20 nt, synthetic construct
  misc_feature 1..20: note = spacer sequence
  source 1..20: mol_type = other RNA
gagaaccacaataaaatgac

SEQ ID NO: 7405 - RNA, 20 nt, synthetic construct
  misc_feature 1..20: note = spacer sequence
  source 1..20: mol_type = other RNA
gaaccacacacaccactgct

SEQ ID NO: 7406 - RNA, 20 nt, synthetic construct
  misc_feature 1..20: note = spacer sequence
  source 1..20: mol_type = other RNA
ctgaaccacacacaccactg

SEQ ID NO: 7407 - RNA, 20 nt, synthetic construct
  misc_feature 1..20: note = spacer sequence
  source 1..20: mol_type = other RNA
ttttattgtggttctctgaa

SEQ ID NO: 7408 - RNA, 20 nt, synthetic construct
  misc_feature 1..20: note = spacer sequence
  source 1..20: mol_type = other RNA
agtcattttattgtggttct

SEQ ID NO: 7409 - RNA, 20 nt, synthetic construct
  misc_feature 1..20: note = spacer sequence
  source 1..20: mol_type = other RNA
tcaagtcattttattgtggt

SEQ ID NO: 7410 - RNA, 20 nt, synthetic construct
  misc_feature 1..20: note = spacer sequence
  source 1..20: mol_type = other RNA
tagttttcatcaagtcattt

SEQ ID NO: 7411 - RNA, 20 nt, synthetic construct
  misc_feature 1..20: note = spacer sequence
  source 1..20: mol_type = other RNA
tcttagttttcatcaagtca

SEQ ID NO: 7412 - RNA, 20 nt, synthetic construct
  misc_feature 1..20: note = spacer sequence
  source 1..20: mol_type = other RNA
tttcttcttagttttcatca

SEQ ID NO: 7413 - RNA, 20 nt, synthetic construct
  misc_feature 1..20: note = spacer sequence
  source 1..20: mol_type = other RNA
cctttcttcttagttttcat

SEQ ID NO: 7414 - RNA, 20 nt, synthetic construct
  misc_feature 1..20: note = spacer sequence
  source 1..20: mol_type = other RNA
gtattttctcctttcttctt

SEQ ID NO: 7415 - RNA, 20 nt, synthetic construct
  misc_feature 1..20: note = spacer sequence
  source 1..20: mol_type = other RNA
tctgtattttctcctttctt

SEQ ID NO: 7416 - RNA, 20 nt, synthetic construct
  misc_feature 1..20: note = spacer sequence
  source 1..20: mol_type = other RNA
taaacctcatctgtattttc

SEQ ID NO: 7417 - RNA, 20 nt, synthetic construct
  misc_feature 1..20: note = spacer sequence
  source 1..20: mol_type = other RNA
ttagcttcataaacctcatc

SEQ ID NO: 7418 - RNA, 20 nt, synthetic construct
  misc_feature 1..20: note = spacer sequence
  source 1..20: mol_type = other RNA
ctttagcttcataaacctca

SEQ ID NO: 7419 - RNA, 20 nt, synthetic construct
  misc_feature 1..20: note = spacer sequence
  source 1..20: mol_type = other RNA
gggcaattcacaggccctat

SEQ ID NO: 7420 - RNA, 20 nt, synthetic construct
  misc_feature 1..20: note = spacer sequence
  source 1..20: mol_type = other RNA
caggccctatatgccataag

SEQ ID NO: 7421 - RNA, 20 nt, synthetic construct
  misc_feature 1..20: note = spacer sequence
  source 1..20: mol_type = other RNA
ttatggcatatagggcctgt

SEQ ID NO: 7422 - RNA, 20 nt, synthetic construct
  misc_feature 1..20: note = spacer sequence
  source 1..20: mol_type = other RNA
tccttatggcatatagggcc

SEQ ID NO: 7423 - RNA, 20 nt, synthetic construct
  misc_feature 1..20: note = spacer sequence
  source 1..20: mol_type = other RNA
aggttcctccttatggcata

SEQ ID NO: 7424 - RNA, 20 nt, synthetic construct
  misc_feature 1..20: note = spacer sequence
  source 1..20: mol_type = other RNA
aagtccaggttcctccttat

SEQ ID NO: 7425 - RNA, 20 nt, synthetic construct
  misc_feature 1..20: note = spacer sequence
  source 1..20: mol_type = other RNA
agtggtgcagaaaaccaagt

SEQ ID NO: 7426 - RNA, 20 nt, synthetic construct
  misc_feature 1..20: note = spacer sequence
  source 1..20: mol_type = other RNA
gcaccactagaggtcaaagt

SEQ ID NO: 7427 - RNA, 20 nt, synthetic construct
  misc_feature 1..20: note = spacer sequence
  source 1..20: mol_type = other RNA
ctgctaaaaattacttggtt

SEQ ID NO: 7428 - RNA, 20 nt, synthetic construct
  misc_feature 1..20: note = spacer sequence
  source 1..20: mol_type = other RNA
tttatccctgctaaaaatta

SEQ ID NO: 7429 - RNA, 20 nt, synthetic construct
  misc_feature 1..20: note = spacer sequence
  source 1..20: mol_type = other RNA
atgattgtttttgatagatc

SEQ ID NO: 7430 - RNA, 20 nt, synthetic construct
  misc_feature 1..20: note = spacer sequence
  source 1..20: mol_type = other RNA
tagaatcatttatccctgct

SEQ ID NO: 7431 - RNA, 20 nt, synthetic construct
  misc_feature 1..20: note = spacer sequence
  source 1..20: mol_type = other RNA
aaaacaatcatagaatcatt

SEQ ID NO: 7432 - RNA, 20 nt, synthetic construct
  misc_feature 1..20: note = spacer sequence
  source 1..20: mol_type = other RNA
atcaaaaacaatcatagaat

SEQ ID NO: 7433 - RNA, 20 nt, synthetic construct
  misc_feature 1..20: note = spacer sequence
  source 1..20: mol_type = other RNA
ttctggcaagtagtgtatag

SEQ ID NO: 7434 - RNA, 20 nt, synthetic construct
  misc_feature 1..20: note = spacer sequence
  source 1..20: mol_type = other RNA
ggcaagtagtgtataggata

SEQ ID NO: 7435 - RNA, 20 nt, synthetic construct
  misc_feature 1..20: note = spacer sequence
  source 1..20: mol_type = other RNA
tatacactacttgccagaag

SEQ ID NO: 7436 - RNA, 20 nt, synthetic construct
  misc_feature 1..20: note = spacer sequence
  source 1..20: mol_type = other RNA
tagctatcctatacactact

SEQ ID NO: 7437 - RNA, 20 nt, synthetic construct
  misc_feature 1..20: note = spacer sequence
  source 1..20: mol_type = other RNA
cctcttagctatcctataca

SEQ ID NO: 7438 - RNA, 20 nt, synthetic construct
  misc_feature 1..20: note = spacer sequence
  source 1..20: mol_type = other RNA
agagtagttaggcacttatt

SEQ ID NO: 7439 - RNA, 20 nt, synthetic construct
  misc_feature 1..20: note = spacer sequence
  source 1..20: mol_type = other RNA
aggggccttcccctcttagc

SEQ ID NO: 7440 - RNA, 20 nt, synthetic construct
  misc_feature 1..20: note = spacer sequence
  source 1..20: mol_type = other RNA
cgaggggccttcccctctta

SEQ ID NO: 7441 - RNA, 20 nt, synthetic construct
  misc_feature 1..20: note = spacer sequence
  source 1..20: mol_type = other RNA
gagaatccagcagtgacagt

SEQ ID NO: 7442 - RNA, 20 nt, synthetic construct
  misc_feature 1..20: note = spacer sequence
  source 1..20: mol_type = other RNA
gaataagtgcctaactactc

SEQ ID NO: 7443 - RNA, 20 nt, synthetic construct
  misc_feature 1..20: note = spacer sequence
  source 1..20: mol_type = other RNA
ccgaataagtgcctaactac

SEQ ID NO: 7444 - RNA, 20 nt, synthetic construct
  misc_feature 1..20: note = spacer sequence
  source 1..20: mol_type = other RNA
agcagtgacagtgatagtga

SEQ ID NO: 7445 - RNA, 20 nt, synthetic construct
  misc_feature 1..20: note = spacer sequence
  source 1..20: mol_type = other RNA
ctgctggattctccgaataa

SEQ ID NO: 7446 - RNA, 20 nt, synthetic construct
  misc_feature 1..20: note = spacer sequence
  source 1..20: mol_type = other RNA
ctgtcactgctggattctcc

SEQ ID NO: 7447 - RNA, 20 nt, synthetic construct
  misc_feature 1..20: note = spacer sequence
  source 1..20: mol_type = other RNA
ctatcactgtcactgctgga

SEQ ID NO: 7448 - RNA, 20 nt, synthetic construct
  misc_feature 1..20: note = spacer sequence
  source 1..20: mol_type = other RNA
tgtcactatcactgtcactg

SEQ ID NO: 7449 - RNA, 20 nt, synthetic construct
  misc_feature 1..20: note = spacer sequence
  source 1..20: mol_type = other RNA
cttgtcactatcactgtcac

SEQ ID NO: 7450 - RNA, 20 nt, synthetic construct
  misc_feature 1..20: note = spacer sequence
  source 1..20: mol_type = other RNA
gtctcttgtcactatcactg

SEQ ID NO: 7451 - RNA, 20 nt, synthetic construct
  misc_feature 1..20: note = spacer sequence
  source 1..20: mol_type = other RNA
cttcagtctcttgtcactat

SEQ ID NO: 7452 - RNA, 20 nt, synthetic construct
  misc_feature 1..20: note = spacer sequence
  source 1..20: mol_type = other RNA
cacttcagtctcttgtcact

SEQ ID NO: 7453 - RNA, 20 nt, synthetic construct
  misc_feature 1..20: note = spacer sequence
  source 1..20: mol_type = other RNA
agcacctctcacttcagtct

SEQ ID NO: 7454 - RNA, 20 nt, synthetic construct
  misc_feature 1..20: note = spacer sequence
  source 1..20: mol_type = other RNA
ctagcacctctcacttcagt

SEQ ID NO: 7455 - RNA, 20 nt, synthetic construct
  misc_feature 1..20: note = spacer sequence
  source 1..20: mol_type = other RNA
atctctagcacctctcactt

SEQ ID NO: 7456 - RNA, 20 nt, synthetic construct
  misc_feature 1..20: note = spacer sequence
  source 1..20: mol_type = other RNA
tccatctctagcacctctca

SEQ ID NO: 7457 - RNA, 20 nt, synthetic construct
  misc_feature 1..20: note = spacer sequence
  source 1..20: mol_type = other RNA
gtgtgtcctccatctctagc

SEQ ID NO: 7458 - RNA, 20 nt, synthetic construct
  misc_feature 1..20: note = spacer sequence
  source 1..20: mol_type = other RNA
tcagtgtgtcctccatctct

SEQ ID NO: 7459 - RNA, 20 nt, synthetic construct
  misc_feature 1..20: note = spacer sequence
  source 1..20: mol_type = other RNA
actaaatgtcttcagtgtgt

SEQ ID NO: 7460 - RNA, 20 nt, synthetic construct
  misc_feature 1..20: note = spacer sequence
  source 1..20: mol_type = other RNA
tgtccactaaatgtcttcag

SEQ ID NO: 7461 - RNA, 20 nt, synthetic construct
  misc_feature 1..20: note = spacer sequence
  source 1..20: mol_type = other RNA
ttcctgtccactaaatgtct

SEQ ID NO: 7462 - RNA, 20 nt, synthetic construct
  misc_feature 1..20: note = spacer sequence
  source 1..20: mol_type = other RNA
cttacaccctgtccttcctg

SEQ ID NO: 7463 - RNA, 20 nt, synthetic construct
  misc_feature 1..20: note = spacer sequence
  source 1..20: mol_type = other RNA
tacatcgcttacaccctgtc

SEQ ID NO: 7464 - RNA, 20 nt, synthetic construct
  misc_feature 1..20: note = spacer sequence
  source 1..20: mol_type = other RNA
ctgccttaactgagcggatg

SEQ ID NO: 7465 - RNA, 20 nt, synthetic construct
  misc_feature 1..20: note = spacer sequence
  source 1..20: mol_type = other RNA
gccttaactgagcggatgca

SEQ ID NO: 7466 - RNA, 20 nt, synthetic construct
  misc_feature 1..20: note = spacer sequence
  source 1..20: mol_type = other RNA
gttaaggcagagagctgtgt

SEQ ID NO: 7467 - RNA, 20 nt, synthetic construct
  misc_feature 1..20: note = spacer sequence
  source 1..20: mol_type = other RNA
gctcagttaaggcagagagc

SEQ ID NO: 7468 - RNA, 20 nt, synthetic construct
  misc_feature 1..20: note = spacer sequence
  source 1..20: mol_type = other RNA
acgcaagatcagaagagtga

SEQ ID NO: 7469 - RNA, 20 nt, synthetic construct
  misc_feature 1..20: note = spacer sequence
  source 1..20: mol_type = other RNA
tgcgttgacagctgcatccg

SEQ ID NO: 7470 - RNA, 20 nt, synthetic construct
  misc_feature 1..20: note = spacer sequence
  source 1..20: mol_type = other RNA
gaagagtgatggtgttaact

SEQ ID NO: 7471 - RNA, 20 nt, synthetic construct
  misc_feature 1..20: note = spacer sequence
  source 1..20: mol_type = other RNA
gatcttgcgttgacagctgc

SEQ ID NO: 7472 - RNA, 20 nt, synthetic construct
  misc_feature 1..20: note = spacer sequence
  source 1..20: mol_type = other RNA
tctgatcttgcgttgacagc

SEQ ID NO: 7473 - RNA, 20 nt, synthetic construct
  misc_feature 1..20: note = spacer sequence
  source 1..20: mol_type = other RNA
ctcttctgatcttgcgttga

SEQ ID NO: 7474 - RNA, 20 nt, synthetic construct
  misc_feature 1..20: note = spacer sequence
  source 1..20: mol_type = other RNA
cccggaatataggtgaaaca

SEQ ID NO: 7475 - RNA, 20 nt, synthetic construct
  misc_feature 1..20: note = spacer sequence
  source 1..20: mol_type = other RNA
gggggagttaacaccatcac

SEQ ID NO: 7476 - RNA, 20 nt, synthetic construct
  misc_feature 1..20: note = spacer sequence
  source 1..20: mol_type = other RNA
cctatattccgggggagtta

SEQ ID NO: 7477 - RNA, 20 nt, synthetic construct
  misc_feature 1..20: note = spacer sequence
  source 1..20: mol_type = other RNA
gacctgggaaacaaattttt

SEQ ID NO: 7478 - RNA, 20 nt, synthetic construct
  misc_feature 1..20: note = spacer sequence
  source 1..20: mol_type = other RNA
gagcccttttttgtttcacc

SEQ ID NO: 7479 - RNA, 20 nt, synthetic construct
  misc_feature 1..20: note = spacer sequence
  source 1..20: mol_type = other RNA
caggtctgagcccttttttg

SEQ ID NO: 7480 - RNA, 20 nt, synthetic construct
  misc_feature 1..20: note = spacer sequence
  source 1..20: mol_type = other RNA
ctgtattaaaaatttgtttc

SEQ ID NO: 7481 - RNA, 20 nt, synthetic construct
  misc_feature 1..20: note = spacer sequence
  source 1..20: mol_type = other RNA
gccctaatgcctcgctgtat

SEQ ID NO: 7482 - RNA, 20 nt, synthetic construct
  misc_feature 1..20: note = spacer sequence
  source 1..20: mol_type = other RNA
ctgttttggtctgccctaat

SEQ ID NO: 7483 - RNA, 20 nt, synthetic construct
  misc_feature 1..20: note = spacer sequence
  source 1..20: mol_type = other RNA
aagtgcctgaattcaaattt

SEQ ID NO: 7484 - RNA, 20 nt, synthetic construct
  misc_feature 1..20: note = spacer sequence
  source 1..20: mol_type = other RNA
ggcacttagagccatcactg

SEQ ID NO: 7485 - RNA, 20 nt, synthetic construct
  misc_feature 1..20: note = spacer sequence
  source 1..20: mol_type = other RNA
aatttgggaagtatggaaaa

SEQ ID NO: 7486 - RNA, 20 nt, synthetic construct
  misc_feature 1..20: note = spacer sequence
  source 1..20: mol_type = other RNA
caaatttgaattcaggcact

SEQ ID NO: 7487 - RNA, 20 nt, synthetic construct
  misc_feature 1..20: note = spacer sequence
  source 1..20: mol_type = other RNA
atacttcccaaatttgaatt

SEQ ID NO: 7488 - RNA, 20 nt, synthetic construct
  misc_feature 1..20: note = spacer sequence
  source 1..20: mol_type = other RNA
agtgtgttttccatacttcc

SEQ ID NO: 7489 - RNA, 20 nt, synthetic construct
  misc_feature 1..20: note = spacer sequence
  source 1..20: mol_type = other RNA
tggttatttttagttaaact

SEQ ID NO: 7490 - RNA, 20 nt, synthetic construct
  misc_feature 1..20: note = spacer sequence
  source 1..20: mol_type = other RNA
gtaaatatttcctatgacga

SEQ ID NO: 7491 - RNA, 20 nt, synthetic construct
  misc_feature 1..20: note = spacer sequence
  source 1..20: mol_type = other RNA
tatgacgatccaaaaaacag

SEQ ID NO: 7492 - RNA, 20 nt, synthetic construct
  misc_feature 1..20: note = spacer sequence
  source 1..20: mol_type = other RNA
taggaaatatttacagattc

SEQ ID NO: 7493 - RNA, 20 nt, synthetic construct
  misc_feature 1..20: note = spacer sequence
  source 1..20: mol_type = other RNA
tcataggaaatatttacaga

SEQ ID NO: 7494 - RNA, 20 nt, synthetic construct
  misc_feature 1..20: note = spacer sequence
  source 1..20: mol_type = other RNA
aaaaaacagttgatttacaa

SEQ ID NO: 7495 - RNA, 20 nt, synthetic construct
  misc_feature 1..20: note = spacer sequence
  source 1..20: mol_type = other RNA
actgttttttggatcgtcat

SEQ ID NO: 7496 - RNA, 20 nt, synthetic construct
  misc_feature 1..20: note = spacer sequence
  source 1..20: mol_type = other RNA
ccacccccttttgtaattgt

SEQ ID NO: 7497 - RNA, 20 nt, synthetic construct
  misc_feature 1..20: note = spacer sequence
  source 1..20: mol_type = other RNA
ccccacccccttttgtaatt

SEQ ID NO: 7498 - RNA, 20 nt, synthetic construct
  misc_feature 1..20: note = spacer sequence
  source 1..20: mol_type = other RNA
acagcaaagatgcctgaaat

SEQ ID NO: 7499 - RNA, 20 nt, synthetic construct
  misc_feature 1..20: note = spacer sequence
  source 1..20: mol_type = other RNA
ttgctgtagatggcaatggt

SEQ ID NO: 7500 - RNA, 20 nt, synthetic construct
  misc_feature 1..20: note = spacer sequence
  source 1..20: mol_type = other RNA
ggcatctttgctgtagatgg

SEQ ID NO: 7501 - RNA, 20 nt, synthetic construct
  misc_feature 1..20: note = spacer sequence
  source 1..20: mol_type = other RNA
caccatttcaggcatctttg

SEQ ID NO: 7502 - RNA, 20 nt, synthetic construct
  misc_feature 1..20: note = spacer sequence
  source 1..20: mol_type = other RNA
ttatttcacaccatttcagg

SEQ ID NO: 7503 - RNA, 20 nt, synthetic construct
  misc_feature 1..20: note = spacer sequence
  source 1..20: mol_type = other RNA
cccgtagccctttaatgtac

SEQ ID NO: 7504 - RNA, 20 nt, synthetic construct
  misc_feature 1..20: note = spacer sequence
  source 1..20: mol_type = other RNA
cacctcccccgtagcccttt

SEQ ID NO: 7505 - RNA, 20 nt, synthetic construct
  misc_feature 1..20: note = spacer sequence
  source 1..20: mol_type = other RNA
cccacctcccccgtagccct

SEQ ID NO: 7506 - RNA, 20 nt, synthetic construct
  misc_feature 1..20: note = spacer sequence
  source 1..20: mol_type = other RNA
tttctcccacctcccccgta

SEQ ID NO: 7507 - RNA, 20 nt, synthetic construct
  misc_feature 1..20: note = spacer sequence
  source 1..20: mol_type = other RNA
accttcctttctcccacctc

SEQ ID NO: 7508 - RNA, 20 nt, synthetic construct
  misc_feature 1..20: note = spacer sequence
  source 1..20: mol_type = other RNA
tagttggagtccaacgtgga

SEQ ID NO: 7509 - RNA, 20 nt, synthetic construct
  misc_feature 1..20: note = spacer sequence
  source 1..20: mol_type = other RNA
aactatgaaatcaaccttcc

SEQ ID NO: 7510 - RNA, 20 nt, synthetic construct
  misc_feature 1..20: note = spacer sequence
  source 1..20: mol_type = other RNA
aacgtggaccttgaaatctc

SEQ ID NO: 7511 - RNA, 20 nt, synthetic construct
  misc_feature 1..20: note = spacer sequence
  source 1..20: mol_type = other RNA
acgttggactccaactatga

SEQ ID NO: 7512 - RNA, 20 nt, synthetic construct
  misc_feature 1..20: note = spacer sequence
  source 1..20: mol_type = other RNA
aggtccacgttggactccaa

SEQ ID NO: 7513 - RNA, 20 nt, synthetic construct
  misc_feature 1..20: note = spacer sequence
  source 1..20: mol_type = other RNA
ccggagaatgtgcataaggg

SEQ ID NO: 7514 - RNA, 20 nt, synthetic construct
  misc_feature 1..20: note = spacer sequence
  source 1..20: mol_type = other RNA
ggagaatgtgcataagggat

SEQ ID NO: 7515 - RNA, 20 nt, synthetic construct
  misc_feature 1..20: note = spacer sequence
  source 1..20: mol_type = other RNA
ggagatttcaaggtccacgt

SEQ ID NO: 7516 - RNA, 20 nt, synthetic construct
  misc_feature 1..20: note = spacer sequence
  source 1..20: mol_type = other RNA
ccggagatttcaaggtccac

SEQ ID NO: 7517 - RNA, 20 nt, synthetic construct
  misc_feature 1..20: note = spacer sequence
  source 1..20: mol_type = other RNA
cttatgcacattctccggag

SEQ ID NO: 7518 - RNA, 20 nt, synthetic construct
  misc_feature 1..20: note = spacer sequence
  source 1..20: mol_type = other RNA
ttatatgccttttgtatccc

SEQ ID NO: 7519 - RNA, 20 nt, synthetic construct
  misc_feature 1..20: note = spacer sequence
  source 1..20: mol_type = other RNA
gtcaaggaccacagagtgta

SEQ ID NO: 7520 - RNA, 20 nt, synthetic construct
  misc_feature 1..20: note = spacer sequence
  source 1..20: mol_type = other RNA
aggaccacagagtgtacgca

SEQ ID NO: 7521 - RNA, 20 nt, synthetic construct
  misc_feature 1..20: note = spacer sequence
  source 1..20: mol_type = other RNA
ttgacagaaagccaccctat

SEQ ID NO: 7522 - RNA, 20 nt, synthetic construct
  misc_feature 1..20: note = spacer sequence
  source 1..20: mol_type = other RNA
gtggtccttgacagaaagcc

SEQ ID NO: 7523 - RNA, 20 nt, synthetic construct
  misc_feature 1..20: note = spacer sequence
  source 1..20: mol_type = other RNA
gggagacagatataaaacat

SEQ ID NO: 7524 - RNA, 20 nt, synthetic construct
  misc_feature 1..20: note = spacer sequence
  source 1..20: mol_type = other RNA
ctgactgcgtacactctgtg

SEQ ID NO: 7525 - RNA, 20 nt, synthetic construct
  misc_feature 1..20: note = spacer sequence
  source 1..20: mol_type = other RNA
ccctgactgcgtacactctg

SEQ ID NO: 7526 - RNA, 20 nt, synthetic construct
  misc_feature 1..20: note = spacer sequence
  source 1..20: mol_type = other RNA
gtctccctgactgcgtacac

SEQ ID NO: 7527 - RNA, 20 nt, synthetic construct
  misc_feature 1..20: note = spacer sequence
  source 1..20: mol_type = other RNA
gatttaaatattgtgggagt

SEQ ID NO: 7528 - RNA, 20 nt, synthetic construct
  misc_feature 1..20: note = spacer sequence
  source 1..20: mol_type = other RNA
gaccttttacattttatgtt

SEQ ID NO: 7529 - RNA, 20 nt, synthetic construct
  misc_feature 1..20: note = spacer sequence
  source 1..20: mol_type = other RNA
cacaatatttaaatcagacc

SEQ ID NO: 7530 - RNA, 20 nt, synthetic construct
  misc_feature 1..20: note = spacer sequence
  source 1..20: mol_type = other RNA
ctcccacaatatttaaatca

SEQ ID NO: 7531 - RNA, 20 nt, synthetic construct
  misc_feature 1..20: note = spacer sequence
  source 1..20: mol_type = other RNA
gttgcagaggattttgcaga

SEQ ID NO: 7532 - RNA, 20 nt, synthetic construct
  misc_feature 1..20: note = spacer sequence
  source 1..20: mol_type = other RNA
gcaactgatgcagttggtca

SEQ ID NO: 7533 - RNA, 20 nt, synthetic construct
  misc_feature 1..20: note = spacer sequence
  source 1..20: mol_type = other RNA
tctgcaactgatgcagttgg

SEQ ID NO: 7534 - RNA, 20 nt, synthetic construct
  misc_feature 1..20: note = spacer sequence
  source 1..20: mol_type = other RNA
gcaaaatcctctgcaactga

SEQ ID NO: 7535 - RNA, 20 nt, synthetic construct
  misc_feature 1..20: note = spacer sequence
  source 1..20: mol_type = other RNA
tctgcaaaatcctctgcaac

SEQ ID NO: 7536 - RNA, 20 nt, synthetic construct
  misc_feature 1..20: note = spacer sequence
  source 1..20: mol_type = other RNA
gtgagatctttacagaaaaa

SEQ ID NO: 7537 - RNA, 20 nt, synthetic construct
  misc_feature 1..20: note = spacer sequence
  source 1..20: mol_type = other RNA
ctgaaattttgcatcctctg

SEQ ID NO: 7538 - RNA, 20 nt, synthetic construct
  misc_feature 1..20: note = spacer sequence
  source 1..20: mol_type = other RNA
cactgaaattttgcatcctc

SEQ ID NO: 7539 - RNA, 20 nt, synthetic construct
  misc_feature 1..20: note = spacer sequence
  source 1..20: mol_type = other RNA
ttacagaaaaagaggaacga

SEQ ID NO: 7540 - RNA, 20 nt, synthetic construct
  misc_feature 1..20: note = spacer sequence
  source 1..20: mol_type = other RNA
gtaaagatctcactgaaatt

SEQ ID NO: 7541 - RNA, 20 nt, synthetic construct
  misc_feature 1..20: note = spacer sequence
  source 1..20: mol_type = other RNA
ttttctgtaaagatctcact

SEQ ID NO: 7542 - RNA, 20 nt, synthetic construct
  misc_feature 1..20: note = spacer sequence
  source 1..20: mol_type = other RNA
tctttttctgtaaagatctc

SEQ ID NO: 7543 - RNA, 20 nt, synthetic construct
  misc_feature 1..20: note = spacer sequence
  source 1..20: mol_type = other RNA
ttcctctttttctgtaaaga

SEQ ID NO: 7544 - RNA, 20 nt, synthetic construct
  misc_feature 1..20: note = spacer sequence
  source 1..20: mol_type = other RNA
gttcctctacctgttttggt

SEQ ID NO: 7545 - RNA, 20 nt, synthetic construct
  misc_feature 1..20: note = spacer sequence
  source 1..20: mol_type = other RNA
tctacctgttttggtcaaca

SEQ ID NO: 7546 - RNA, 20 nt, synthetic construct
  misc_feature 1..20: note = spacer sequence
  source 1..20: mol_type = other RNA
acctgttttggtcaacaacc

SEQ ID NO: 7547 - RNA, 20 nt, synthetic construct
  misc_feature 1..20: note = spacer sequence
  source 1..20: mol_type = other RNA
acaaccctatcttccattct

SEQ ID NO: 7548 - RNA, 20 nt, synthetic construct
  misc_feature 1..20: note = spacer sequence
  source 1..20: mol_type = other RNA
tccattctaccagagccacc

SEQ ID NO: 7549 - RNA, 20 nt, synthetic construct
  misc_feature 1..20: note = spacer sequence
  source 1..20: mol_type = other RNA
attctaccagagccaccatc

SEQ ID NO: 7550 - RNA, 20 nt, synthetic construct
  misc_feature 1..20: note = spacer sequence
  source 1..20: mol_type = other RNA
accagagccaccatctctag

SEQ ID NO: 7551 - RNA, 20 nt, synthetic construct
  misc_feature 1..20: note = spacer sequence
  source 1..20: mol_type = other RNA
ggtagaatggaagatagggt

SEQ ID NO: 7552 - RNA, 20 nt, synthetic construct
  misc_feature 1..20: note = spacer sequence
  source 1..20: mol_type = other RNA
ctaggagctctagatgtttg

SEQ ID NO: 7553 - RNA, 20 nt, synthetic construct
  misc_feature 1..20: note = spacer sequence
  source 1..20: mol_type = other RNA
aggagctctagatgtttgat

SEQ ID NO: 7554 - RNA, 20 nt, synthetic construct
  misc_feature 1..20: note = spacer sequence
  source 1..20: mol_type = other RNA
tagagatggtggctctggta

SEQ ID NO: 7555 - RNA, 20 nt, synthetic construct
  misc_feature 1..20: note = spacer sequence
  source 1..20: mol_type = other RNA
agatgtttgatcactaataa

SEQ ID NO: 7556 - RNA, 20 nt, synthetic construct
  misc_feature 1..20: note = spacer sequence
  source 1..20: mol_type = other RNA
agagctcctagagatggtgg

SEQ ID NO: 7557 - RNA, 20 nt, synthetic construct
  misc_feature 1..20: note = spacer sequence
  source 1..20: mol_type = other RNA
aacatctagagctcctagag

SEQ ID NO: 7558 - RNA, 20 nt, synthetic construct
  misc_feature 1..20: note = spacer sequence
  source 1..20: mol_type = other RNA
ctaataaagtcattacttcc

SEQ ID NO: 7559 - RNA, 20 nt, synthetic construct
  misc_feature 1..20: note = spacer sequence
  source 1..20: mol_type = other RNA
ttacttccaaattcccaatt

SEQ ID NO: 7560 - RNA, 20 nt, synthetic construct
  misc_feature 1..20: note = spacer sequence
  source 1..20: mol_type = other RNA
aaattcccaatttcaagtac

SEQ ID NO: 7561 - RNA, 20 nt, synthetic construct
  misc_feature 1..20: note = spacer sequence
  source 1..20: mol_type = other RNA
caatttcaagtaccccactc

SEQ ID NO: 7562 - RNA, 20 nt, synthetic construct
  misc_feature 1..20: note = spacer sequence
  source 1..20: mol_type = other RNA
agtaccccactctttacctg

SEQ ID NO: 7563 - RNA, 20 nt, synthetic construct
  misc_feature 1..20: note = spacer sequence
  source 1..20: mol_type = other RNA
ttacctgcttctcctctttc

SEQ ID NO: 7564 - RNA, 20 nt, synthetic construct
  misc_feature 1..20: note = spacer sequence
  source 1..20: mol_type = other RNA
cctctttccaggttattctc

SEQ ID NO: 7565 - RNA, 20 nt, synthetic construct
  misc_feature 1..20: note = spacer sequence
  source 1..20: mol_type = other RNA
tctttccaggttattctctc

SEQ ID NO: 7566 - RNA, 20 nt, synthetic construct
  misc_feature 1..20: note = spacer sequence
  source 1..20: mol_type = other RNA
ttccaggttattctctccag

SEQ ID NO: 7567 - RNA, 20 nt, synthetic construct
  misc_feature 1..20: note = spacer sequence
  source 1..20: mol_type = other RNA
aggttattctctccagatct

SEQ ID NO: 7568 - RNA, 20 nt, synthetic construct
  misc_feature 1..20: note = spacer sequence
  source 1..20: mol_type = other RNA
ctccagatctcctttcccca

SEQ ID NO: 7569 - RNA, 20 nt, synthetic construct
  misc_feature 1..20: note = spacer sequence
  source 1..20: mol_type = other RNA
ccagatctcctttccccaaa

SEQ ID NO: 7570 - RNA, 20 nt, synthetic construct
  misc_feature 1..20: note = spacer sequence
  source 1..20: mol_type = other RNA
agatctcctttccccaaaca

SEQ ID NO: 7571 - RNA, 20 nt, synthetic construct
  misc_feature 1..20: note = spacer sequence
  source 1..20: mol_type = other RNA
ggagagaataacctggaaag

SEQ ID NO: 7572 - RNA, 20 nt, synthetic construct
  misc_feature 1..20: note = spacer sequence
  source 1..20: mol_type = other RNA
cctttccccaaacaatcttc

SEQ ID NO: 7573 - RNA, 20 nt, synthetic construct
  misc_feature 1..20: note = spacer sequence
  source 1..20: mol_type = other RNA
tttccccaaacaatcttcaa

SEQ ID NO: 7574 - RNA, 20 nt, synthetic construct
  misc_feature 1..20: note = spacer sequence
  source 1..20: mol_type = other RNA
ccaaacaatcttcaatccca

SEQ ID NO: 7575 - RNA, 20 nt, synthetic construct
  misc_feature 1..20: note = spacer sequence
  source 1..20: mol_type = other RNA
tcaatcccaccaggctcatg

SEQ ID NO: 7576 - RNA, 20 nt, synthetic construct
  misc_feature 1..20: note = spacer sequence
  source 1..20: mol_type = other RNA
atcccaccaggctcatgcct

SEQ ID NO: 7577 - RNA, 20 nt, synthetic construct
  misc_feature 1..20: note = spacer sequence
  source 1..20: mol_type = other RNA
caccaggctcatgcctcaca

SEQ ID NO: 7578 - RNA, 20 nt, synthetic construct
  misc_feature 1..20: note = spacer sequence
  source 1..20: mol_type = other RNA
tgcctcacaaggcccttcat

SEQ ID NO: 7579 - RNA, 20 nt, synthetic construct
  misc_feature 1..20: note = spacer sequence
  source 1..20: mol_type = other RNA
caaggcccttcatgttttta

SEQ ID NO: 7580 - RNA, 20 nt, synthetic construct
  misc_feature 1..20: note = spacer sequence
  source 1..20: mol_type = other RNA
tgtttttatcttaatcctta

SEQ ID NO: 7581 - RNA, 20 nt, synthetic construct
  misc_feature 1..20: note = spacer sequence
  source 1..20: mol_type = other RNA
taatccttacctgctctgga

SEQ ID NO: 7582 - RNA, 20 nt, synthetic construct
  misc_feature 1..20: note = spacer sequence
  source 1..20: mol_type = other RNA
ttacctgctctggagtccat

SEQ ID NO: 7583 - RNA, 20 nt, synthetic construct
  misc_feature 1..20: note = spacer sequence
  source 1..20: mol_type = other RNA
ggagtccatggctctccctc

SEQ ID NO: 7584 - RNA, 20 nt, synthetic construct
  misc_feature 1..20: note = spacer sequence
  source 1..20: mol_type = other RNA
agagcaggtaaggattaaga

SEQ ID NO: 7585 - RNA, 20 nt, synthetic construct
  misc_feature 1..20: note = spacer sequence
  source 1..20: mol_type = other RNA
atggctctccctcaccatat

SEQ ID NO: 7586 - RNA, 20 nt, synthetic construct
  misc_feature 1..20: note = spacer sequence
  source 1..20: mol_type = other RNA
ccctcaccatatctgcctgg

SEQ ID NO: 7587 - RNA, 20 nt, synthetic construct
  misc_feature 1..20: note = spacer sequence
  source 1..20: mol_type = other RNA
ctcaccatatctgcctggaa

SEQ ID NO: 7588 - RNA, 20 nt, synthetic construct
  misc_feature 1..20: note = spacer sequence
  source 1..20: mol_type = other RNA
ccatatctgcctggaaaatc

SEQ ID NO: 7589 - RNA, 20 nt, synthetic construct
  misc_feature 1..20: note = spacer sequence
  source 1..20: mol_type = other RNA
gcctggaaaatccccaacat

SEQ ID NO: 7590 - RNA, 20 nt, synthetic construct
  misc_feature 1..20: note = spacer sequence
  source 1..20: mol_type = other RNA
aggcagatatggtgagggag

SEQ ID NO: 7591 - RNA, 20 nt, synthetic construct
  misc_feature 1..20: note = spacer sequence
  source 1..20: mol_type = other RNA
ccaacattggttttaaatgc

SEQ ID NO: 7592 - RNA, 20 nt, synthetic construct
  misc_feature 1..20: note = spacer sequence
  source 1..20: mol_type = other RNA
tctgcctaatctccacctgg

SEQ ID NO: 7593 - RNA, 20 nt, synthetic construct
  misc_feature 1..20: note = spacer sequence
  source 1..20: mol_type = other RNA
gcctaatctccacctggaca

SEQ ID NO: 7594 - RNA, 20 nt, synthetic construct
  misc_feature 1..20: note = spacer sequence
  source 1..20: mol_type = other RNA
ccacctggacatggagtatg

SEQ ID NO: 7595 - RNA, 20 nt, synthetic construct
  misc_feature 1..20: note = spacer sequence
  source 1..20: mol_type = other RNA
acctggacatggagtatgct

SEQ ID NO: 7596 - RNA, 20 nt, synthetic construct
  misc_feature 1..20: note = spacer sequence
  source 1..20: mol_type = other RNA
aggtggagattaggcagaag

SEQ ID NO: 7597 - RNA, 20 nt, synthetic construct
  misc_feature 1..20: note = spacer sequence
  source 1..20: mol_type = other RNA
atgtccaggtggagattagg

SEQ ID NO: 7598 - RNA, 20 nt, synthetic construct
  misc_feature 1..20: note = spacer sequence
  source 1..20: mol_type = other RNA
gcatactccatgtccaggtg

SEQ ID NO: 7599 - RNA, 20 nt, synthetic construct
  misc_feature 1..20: note = spacer sequence
  source 1..20: mol_type = other RNA
catttcaaatttctgtaatt

SEQ ID NO: 7600 - RNA, 20 nt, synthetic construct
  misc_feature 1..20: note = spacer sequence
  source 1..20: mol_type = other RNA
tttcaaatttctgtaattac

SEQ ID NO: 7601 - RNA, 20 nt, synthetic construct
  misc_feature 1..20: note = spacer sequence
  source 1..20: mol_type = other RNA
aatttctgtaattacaaccc

SEQ ID NO: 7602 - RNA, 20 nt, synthetic construct
  misc_feature 1..20: note = spacer sequence
  source 1..20: mol_type = other RNA
gtaattacaacccaagtgga

SEQ ID NO: 7603 - RNA, 20 nt, synthetic construct
  misc_feature 1..20: note = spacer sequence
  source 1..20: mol_type = other RNA
acttgggttgtaattacaga

SEQ ID NO: 7604 - RNA, 20 nt, synthetic construct
  misc_feature 1..20: note = spacer sequence
  source 1..20: mol_type = other RNA
ttctggccagtaatctaaca

SEQ ID NO: 7605 - RNA, 20 nt, synthetic construct
  misc_feature 1..20: note = spacer sequence
  source 1..20: mol_type = other RNA
ggccagtaatctaacatttt

SEQ ID NO: 7606 - RNA, 20 nt, synthetic construct
  misc_feature 1..20: note = spacer sequence
  source 1..20: mol_type = other RNA
aacattttcctagtcaatcc

SEQ ID NO: 7607 - RNA, 20 nt, synthetic construct
  misc_feature 1..20: note = spacer sequence
  source 1..20: mol_type = other RNA
tagtcaatccacattctcat

SEQ ID NO: 7608 - RNA, 20 nt, synthetic construct
  misc_feature 1..20: note = spacer sequence
  source 1..20: mol_type = other RNA
atccacattctcatgtcctg

SEQ ID NO: 7609 - RNA, 20 nt, synthetic construct
  misc_feature 1..20: note = spacer sequence
  source 1..20: mol_type = other RNA
acattctcatgtcctggatg

SEQ ID NO: 7610 - RNA, 20 nt, synthetic construct
  misc_feature 1..20: note = spacer sequence
  source 1..20: mol_type = other RNA
catgtcctggatgaggacac

SEQ ID NO: 7611 - RNA, 20 nt, synthetic construct
  misc_feature 1..20: note = spacer sequence
  source 1..20: mol_type = other RNA
tgtcctggatgaggacacat

SEQ ID NO: 7612 - RNA, 20 nt, synthetic construct
  misc_feature 1..20: note = spacer sequence
  source 1..20: mol_type = other RNA
tggatgaggacacatgttca

SEQ ID NO: 7613 - RNA, 20 nt, synthetic construct
  misc_feature 1..20: note = spacer sequence
  source 1..20: mol_type = other RNA
aggacatgagaatgtggatt

SEQ ID NO: 7614 - RNA, 20 nt, synthetic construct
  misc_feature 1..20: note = spacer sequence
  source 1..20: mol_type = other RNA
tccaggacatgagaatgtgg

SEQ ID NO: 7615 - RNA, 20 nt, synthetic construct
  misc_feature 1..20: note = spacer sequence
  source 1..20: mol_type = other RNA
tcatccaggacatgagaatg

SEQ ID NO: 7616 - RNA, 20 nt, synthetic construct
  misc_feature 1..20: note = spacer sequence
  source 1..20: mol_type = other RNA
aggtcctccttcatcctgtc

SEQ ID NO: 7617 - RNA, 20 nt, synthetic construct
  misc_feature 1..20: note = spacer sequence
  source 1..20: mol_type = other RNA
tccttcatcctgtctactct

SEQ ID NO: 7618 - RNA, 20 nt, synthetic construct
  misc_feature 1..20: note = spacer sequence
  source 1..20: mol_type = other RNA
ttcatcctgtctactcttag

SEQ ID NO: 7619 - RNA, 20 nt, synthetic construct
  misc_feature 1..20: note = spacer sequence
  source 1..20: mol_type = other RNA
tcctgtctactcttagttgt

SEQ ID NO: 7620 - RNA, 20 nt, synthetic construct
  misc_feature 1..20: note = spacer sequence
  source 1..20: mol_type = other RNA
tgtctactcttagttgtttt

SEQ ID NO: 7621 - RNA, 20 nt, synthetic construct
  misc_feature 1..20: note = spacer sequence
  source 1..20: mol_type = other RNA
actcttagttgttttgtttg

SEQ ID NO: 7622 - RNA, 20 nt, synthetic construct
  misc_feature 1..20: note = spacer sequence
  source 1..20: mol_type = other RNA
tagttgttttgtttggtaat

SEQ ID NO: 7623 - RNA, 20 nt, synthetic construct
  misc_feature 1..20: note = spacer sequence
  source 1..20: mol_type = other RNA
gtaaggtaaaattcacacat

SEQ ID NO: 7624 - RNA, 20 nt, synthetic construct
  misc_feature 1..20: note = spacer sequence
  source 1..20: mol_type = other RNA
cacatcctgtaatttaccca

SEQ ID NO: 7625 - RNA, 20 nt, synthetic construct
  misc_feature 1..20: note = spacer sequence
  source 1..20: mol_type = other RNA
tgtaatttacccacataaat

SEQ ID NO: 7626 - RNA, 20 nt, synthetic construct
  misc_feature 1..20: note = spacer sequence
  source 1..20: mol_type = other RNA
atggttttagtatattcaca

SEQ ID NO: 7627 - RNA, 20 nt, synthetic construct
  misc_feature 1..20: note = spacer sequence
  source 1..20: mol_type = other RNA
cagaattgggcaactatcac

SEQ ID NO: 7628 - RNA, 20 nt, synthetic construct
  misc_feature 1..20: note = spacer sequence
  source 1..20: mol_type = other RNA
gtgaatatactaaaaccatt

SEQ ID NO: 7629 - RNA, 20 nt, synthetic construct
  misc_feature 1..20: note = spacer sequence
  source 1..20: mol_type = other RNA
caatcaactttagaacattt

SEQ ID NO: 7630 - RNA, 20 nt, synthetic construct
  misc_feature 1..20: note = spacer sequence
  source 1..20: mol_type = other RNA
actttagaacatttttatta

SEQ ID NO: 7631 - RNA, 20 nt, synthetic construct
  misc_feature 1..20: note = spacer sequence
  source 1..20: mol_type = other RNA
aaagttgattgtgatagttg

SEQ ID NO: 7632 - RNA, 20 nt, synthetic construct
  misc_feature 1..20: note = spacer sequence
  source 1..20: mol_type = other RNA
ttttagggtaataaaaatgt

SEQ ID NO: 7633 - RNA, 20 nt, synthetic construct
  misc_feature 1..20: note = spacer sequence
  source 1..20: mol_type = other RNA
tgcatccgtgggccatctct

SEQ ID NO: 7634 - RNA, 20 nt, synthetic construct
  misc_feature 1..20: note = spacer sequence
  source 1..20: mol_type = other RNA
gtgggccatctctatttccc

SEQ ID NO: 7635 - RNA, 20 nt, synthetic construct
  misc_feature 1..20: note = spacer sequence
  source 1..20: mol_type = other RNA
ctatttccccagctttcccc

SEQ ID NO: 7636 - RNA, 20 nt, synthetic construct
  misc_feature 1..20: note = spacer sequence
  source 1..20: mol_type = other RNA
atttccccagctttcccctc

SEQ ID NO: 7637 - RNA, 20 nt, synthetic construct
  misc_feature 1..20: note = spacer sequence
  source 1..20: mol_type = other RNA
ccagctttcccctcatctgt

SEQ ID NO: 7638 - RNA, 20 nt, synthetic construct
  misc_feature 1..20: note = spacer sequence
  source 1..20: mol_type = other RNA
cctcatctgtcccagcccca

SEQ ID NO: 7639 - RNA, 20 nt, synthetic construct
  misc_feature 1..20: note = spacer sequence
  source 1..20: mol_type = other RNA
tctgtcccagccccaagcaa

SEQ ID NO: 7640 - RNA, 20 nt, synthetic construct
  misc_feature 1..20: note = spacer sequence
  source 1..20: mol_type = other RNA
gtcccagccccaagcaacca

SEQ ID NO: 7641 - RNA, 20 nt, synthetic construct
  misc_feature 1..20: note = spacer sequence
  source 1..20: mol_type = other RNA
cagccccaagcaaccacata

SEQ ID NO: 7642 - RNA, 20 nt, synthetic construct
  misc_feature 1..20: note = spacer sequence
  source 1..20: mol_type = other RNA
gtctctgtgggtttacctat

SEQ ID NO: 7643 - RNA, 20 nt, synthetic construct
  misc_feature 1..20: note = spacer sequence
  source 1..20: mol_type = other RNA
ctgtgggtttacctattaac

SEQ ID NO: 7644 - RNA, 20 nt, synthetic construct
  misc_feature 1..20: note = spacer sequence
  source 1..20: mol_type = other RNA
gtgggtttacctattaacat

SEQ ID NO: 7645 - RNA, 20 nt, synthetic construct
  misc_feature 1..20: note = spacer sequence
  source 1..20: mol_type = other RNA
gtataaatggaatcataaaa

SEQ ID NO: 7646 - RNA, 20 nt, synthetic construct
  misc_feature 1..20: note = spacer sequence
  source 1..20: mol_type = other RNA
atttatacagaatgttaata

SEQ ID NO: 7647 - RNA, 20 nt, synthetic construct
  misc_feature 1..20: note = spacer sequence
  source 1..20: mol_type = other RNA
taaaatatgtggtcctgtgt

SEQ ID NO: 7648 - RNA, 20 nt, synthetic construct
  misc_feature 1..20: note = spacer sequence
  source 1..20: mol_type = other RNA
tgtgtgactgacttttgctt

SEQ ID NO: 7649 - RNA, 20 nt, synthetic construct
  misc_feature 1..20: note = spacer sequence
  source 1..20: mol_type = other RNA
cacaggaccacatattttat

SEQ ID NO: 7650 - RNA, 20 nt, synthetic construct
  misc_feature 1..20: note = spacer sequence
  source 1..20: mol_type = other RNA
gtcacacaggaccacatatt

SEQ ID NO: 7651 - RNA, 20 nt, synthetic construct
  misc_feature 1..20: note = spacer sequence
  source 1..20: mol_type = other RNA
tctcaaggttcatccatgtt

SEQ ID NO: 7652 - RNA, 20 nt, synthetic construct
  misc_feature 1..20: note = spacer sequence
  source 1..20: mol_type = other RNA
caaggttcatccatgttgca

SEQ ID NO: 7653 - RNA, 20 nt, synthetic construct
  misc_feature 1..20: note = spacer sequence
  source 1..20: mol_type = other RNA
aggttcatccatgttgcatg

SEQ ID NO: 7654 - RNA, 20 nt, synthetic construct
  misc_feature 1..20: note = spacer sequence
  source 1..20: mol_type = other RNA
tccatgttgcatgtttaagt

SEQ ID NO: 7655 - RNA, 20 nt, synthetic construct
  misc_feature 1..20: note = spacer sequence
  source 1..20: mol_type = other RNA
atgttgcatgtttaagtcct

SEQ ID NO: 7656 - RNA, 20 nt, synthetic construct
  misc_feature 1..20: note = spacer sequence
  source 1..20: mol_type = other RNA
ttcattttttattactaata

SEQ ID NO: 7657 - RNA, 20 nt, synthetic construct
  misc_feature 1..20: note = spacer sequence
  source 1..20: mol_type = other RNA
ttttttattactaatattcc

SEQ ID NO: 7658 - RNA, 20 nt, synthetic construct
  misc_feature 1..20: note = spacer sequence
  source 1..20: mol_type = other RNA
gtgatatgaatataccatat

SEQ ID NO: 7659 - RNA, 20 nt, synthetic construct
  misc_feature 1..20: note = spacer sequence
  source 1..20: mol_type = other RNA
cggaatattagtaataaaaa

SEQ ID NO: 7660 - RNA, 20 nt, synthetic construct
  misc_feature 1..20: note = spacer sequence
  source 1..20: mol_type = other RNA
tatcacggaatattagtaat

SEQ ID NO: 7661 - RNA, 20 nt, synthetic construct
  misc_feature 1..20: note = spacer sequence
  source 1..20: mol_type = other RNA
tttttttaaaaaggtcttta

SEQ ID NO: 7662 - RNA, 20 nt, synthetic construct
  misc_feature 1..20: note = spacer sequence
  source 1..20: mol_type = other RNA
ttagaaaaagactttttcat

SEQ ID NO: 7663 - RNA, 20 nt, synthetic construct
  misc_feature 1..20: note = spacer sequence
  source 1..20: mol_type = other RNA
aaagacctttttaaaaaaat

SEQ ID NO: 7664 - RNA, 20 nt, synthetic construct
  misc_feature 1..20: note = spacer sequence
  source 1..20: mol_type = other RNA
ttttctaaagacctttttaa

SEQ ID NO: 7665 - RNA, 20 nt, synthetic construct
  misc_feature 1..20: note = spacer sequence
  source 1..20: mol_type = other RNA
tccacccacatgccaccaaa

SEQ ID NO: 7666 - RNA, 20 nt, synthetic construct
  misc_feature 1..20: note = spacer sequence
  source 1..20: mol_type = other RNA
acccacatgccaccaaatct

SEQ ID NO: 7667 - RNA, 20 nt, synthetic construct
  misc_feature 1..20: note = spacer sequence
  source 1..20: mol_type = other RNA
accaatttacctgcacctga

SEQ ID NO: 7668 - RNA, 20 nt, synthetic construct
  misc_feature 1..20: note = spacer sequence
  source 1..20: mol_type = other RNA
ggtgcaggtaaattggtaga

SEQ ID NO: 7669 - RNA, 20 nt, synthetic construct
  misc_feature 1..20: note = spacer sequence
  source 1..20: mol_type = other RNA
acattactcctactgtctgt

SEQ ID NO: 7670 - RNA, 20 nt, synthetic construct
  misc_feature 1..20: note = spacer sequence
  source 1..20: mol_type = other RNA
tactgtctgtgactgtccgt

SEQ ID NO: 7671 - RNA, 20 nt, synthetic construct
  misc_feature 1..20: note = spacer sequence
  source 1..20: mol_type = other RNA
gtgactgtccgtgctccaat

SEQ ID NO: 7672 - RNA, 20 nt, synthetic construct
  misc_feature 1..20: note = spacer sequence
  source 1..20: mol_type = other RNA
cagacagtaggagtaatgtg

SEQ ID NO: 7673 - RNA, 20 nt, synthetic construct
  misc_feature 1..20: note = spacer sequence
  source 1..20: mol_type = other RNA
gtgctccaatggttacacct

SEQ ID NO: 7674 - RNA, 20 nt, synthetic construct
  misc_feature 1..20: note = spacer sequence
  source 1..20: mol_type = other RNA
aatggttacacctgttattt

SEQ ID NO: 7675 - RNA, 20 nt, synthetic construct
  misc_feature 1..20: note = spacer sequence
  source 1..20: mol_type = other RNA
agggtacaaataacaggtgt

SEQ ID NO: 7676 - RNA, 20 nt, synthetic construct
  misc_feature 1..20: note = spacer sequence
  source 1..20: mol_type = other RNA
gtcccctctcacctacataa

SEQ ID NO: 7677 - RNA, 20 nt, synthetic construct
  misc_feature 1..20: note = spacer sequence
  source 1..20: mol_type = other RNA
cctctcacctacataacaac

SEQ ID NO: 7678 - RNA, 20 nt, synthetic construct
  misc_feature 1..20: note = spacer sequence
  source 1..20: mol_type = other RNA
cacctacataacaaccgagc

SEQ ID NO: 7679 - RNA, 20 nt, synthetic construct
  misc_feature 1..20: note = spacer sequence
  source 1..20: mol_type = other RNA
cctacataacaaccgagcac

SEQ ID NO: 7680 - RNA, 20 nt, synthetic construct
  misc_feature 1..20: note = spacer sequence
  source 1..20: mol_type = other RNA
gttgttatgtaggtgagagg

SEQ ID NO: 7681 - RNA, 20 nt, synthetic construct
  misc_feature 1..20: note = spacer sequence
  source 1..20: mol_type = other RNA
tgcttgcaccaacattctcc

SEQ ID NO: 7682 - RNA, 20 nt, synthetic construct
  misc_feature 1..20: note = spacer sequence
  source 1..20: mol_type = other RNA
cccctctactgggcttccca

SEQ ID NO: 7683 - RNA, 20 nt, synthetic construct
  misc_feature 1..20: note = spacer sequence
  source 1..20: mol_type = other RNA
cctctactgggcttcccaat

SEQ ID NO: 7684 - RNA, 20 nt, synthetic construct
  misc_feature 1..20: note = spacer sequence
  source 1..20: mol_type = other RNA
actgggcttcccaatcataa

SEQ ID NO: 7685 - RNA, 20 nt, synthetic construct
  misc_feature 1..20: note = spacer sequence
  source 1..20: mol_type = other RNA
caatcataagtatgctgtag

SEQ ID NO: 7686 - RNA, 20 nt, synthetic construct
  misc_feature 1..20: note = spacer sequence
  source 1..20: mol_type = other RNA
taagtatgctgtagtttttg

SEQ ID NO: 7687 - RNA, 20 nt, synthetic construct
  misc_feature 1..20: note = spacer sequence
  source 1..20: mol_type = other RNA
ttcagaaacaagaacaaaaa

SEQ ID NO: 7688 - RNA, 20 nt, synthetic construct
  misc_feature 1..20: note = spacer sequence
  source 1..20: mol_type = other RNA
gaaacaagaacaaaaattaa

SEQ ID NO: 7689 - RNA, 20 nt, synthetic construct
  misc_feature 1..20: note = spacer sequence
  source 1..20: mol_type = other RNA
gaaagatgggcaaaaactac

SEQ ID NO: 7690 - RNA, 20 nt, synthetic construct
  misc_feature 1..20: note = spacer sequence
  source 1..20: mol_type = other RNA
tgtttctgaaagatgggcaa

SEQ ID NO: 7691 - RNA, 20 nt, synthetic construct
  misc_feature 1..20: note = spacer sequence
  source 1..20: mol_type = other RNA
ctcaccctgcatctcctttc

SEQ ID NO: 7692 - RNA, 20 nt, synthetic construct
  misc_feature 1..20: note = spacer sequence
  source 1..20: mol_type = other RNA
ccctgcatctcctttcaggt

SEQ ID NO: 7693 - RNA, 20 nt, synthetic construct
  misc_feature 1..20: note = spacer sequence
  source 1..20: mol_type = other RNA
cctttcaggtatcaccccat

SEQ ID NO: 7694 - RNA, 20 nt, synthetic construct
  misc_feature 1..20: note = spacer sequence
  source 1..20: mol_type = other RNA
tttcaggtatcaccccatct

SEQ ID NO: 7695 - RNA, 20 nt, synthetic construct
  misc_feature 1..20: note = spacer sequence
  source 1..20: mol_type = other RNA
ggtatcaccccatcttgttt

SEQ ID NO: 7696 - RNA, 20 nt, synthetic construct
  misc_feature 1..20: note = spacer sequence
  source 1..20: mol_type = other RNA
ccccatcttgtttttctcct

SEQ ID NO: 7697 - RNA, 20 nt, synthetic construct
  misc_feature 1..20: note = spacer sequence
  source 1..20: mol_type = other RNA
tgtttttctcctctatagca

SEQ ID NO: 7698 - RNA, 20 nt, synthetic construct
  misc_feature 1..20: note = spacer sequence
  source 1..20: mol_type = other RNA
cctctatagcaaatctcctg

SEQ ID NO: 7699 - RNA, 20 nt, synthetic construct
  misc_feature 1..20: note = spacer sequence
  source 1..20: mol_type = other RNA
tctatagcaaatctcctgag

SEQ ID NO: 7700 - RNA, 20 nt, synthetic construct
  misc_feature 1..20: note = spacer sequence
  source 1..20: mol_type = other RNA
atagcaaatctcctgagatg

SEQ ID NO: 7701 - RNA, 20 nt, synthetic construct
  misc_feature 1..20: note = spacer sequence
  source 1..20: mol_type = other RNA
cctgagatgttcaaaatcct

SEQ ID NO: 7702 - RNA, 20 nt, synthetic construct
  misc_feature 1..20: note = spacer sequence
  source 1..20: mol_type = other RNA
tgagatgttcaaaatcctaa

SEQ ID NO: 7703 - RNA, 20 nt, synthetic construct
  misc_feature 1..20: note = spacer sequence
  source 1..20: mol_type = other RNA
ggagatttgctatagaggag

SEQ ID NO: 7704 - RNA, 20 nt, synthetic construct
  misc_feature 1..20: note = spacer sequence
  source 1..20: mol_type = other RNA
caggagatttgctatagagg

SEQ ID NO: 7705 - RNA, 20 nt, synthetic construct
  misc_feature 1..20: note = spacer sequence
  source 1..20: mol_type = other RNA
aaatcctaattgtatccttc

SEQ ID NO: 7706 - RNA, 20 nt, synthetic construct
  misc_feature 1..20: note = spacer sequence
  source 1..20: mol_type = other RNA
taattgtatccttcatctcc

SEQ ID NO: 7707 - RNA, 20 nt, synthetic construct
  misc_feature 1..20: note = spacer sequence
  source 1..20: mol_type = other RNA
ttcatctcccagtctctcac

SEQ ID NO: 7708 - RNA, 20 nt, synthetic construct
  misc_feature 1..20: note = spacer sequence
  source 1..20: mol_type = other RNA
tctcccagtctctcacaacc

SEQ ID NO: 7709 - RNA, 20 nt, synthetic construct
  misc_feature 1..20: note = spacer sequence
  source 1..20: mol_type = other RNA
cccagtctctcacaacccta

SEQ ID NO: 7710 - RNA, 20 nt, synthetic construct
  misc_feature 1..20: note = spacer sequence
  source 1..20: mol_type = other RNA
cagtctctcacaaccctatg

SEQ ID NO: 7711 - RNA, 20 nt, synthetic construct
  misc_feature 1..20: note = spacer sequence
  source 1..20: mol_type = other RNA
ctcacaaccctatgtaactg

SEQ ID NO: 7712 - RNA, 20 nt, synthetic construct
  misc_feature 1..20: note = spacer sequence
  source 1..20: mol_type = other RNA
cacaaccctatgtaactggg

SEQ ID NO: 7713 - RNA, 20 nt, synthetic construct
  misc_feature 1..20: note = spacer sequence
  source 1..20: mol_type = other RNA
caaccctatgtaactgggct

SEQ ID NO: 7714 - RNA, 20 nt, synthetic construct
  misc_feature 1..20: note = spacer sequence
  source 1..20: mol_type = other RNA
aaagcccagttacatagggt

SEQ ID NO: 7715 - RNA, 20 nt, synthetic construct
  misc_feature 1..20: note = spacer sequence
  source 1..20: mol_type = other RNA
tcaatccaatgaaagcactt

SEQ ID NO: 7716 - RNA, 20 nt, synthetic construct
  misc_feature 1..20: note = spacer sequence
  source 1..20: mol_type = other RNA
atccaatgaaagcacttttc

SEQ ID NO: 7717 - RNA, 20 nt, synthetic construct
  misc_feature 1..20: note = spacer sequence
  source 1..20: mol_type = other RNA
aatgaaagcacttttctcac

SEQ ID NO: 7718 - RNA, 20 nt, synthetic construct
  misc_feature 1..20: note = spacer sequence
  source 1..20: mol_type = other RNA
ttggattgatgagttcaaaa

SEQ ID NO: 7719 - RNA, 20 nt, synthetic construct
  misc_feature 1..20: note = spacer sequence
  source 1..20: mol_type = other RNA
cacagtcaccaggagccttc

SEQ ID NO: 7720 - RNA, 20 nt, synthetic construct
  misc_feature 1..20: note = spacer sequence
  source 1..20: mol_type = other RNA
cagtcaccaggagccttcat

SEQ ID NO: 7721 - RNA, 20 nt, synthetic construct
  misc_feature 1..20: note = spacer sequence
  source 1..20: mol_type = other RNA
ccaggagccttcattttgct

SEQ ID NO: 7722 - RNA, 20 nt, synthetic construct
  misc_feature 1..20: note = spacer sequence
  source 1..20: mol_type = other RNA
tggtgactgtgagaaaagtg

SEQ ID NO: 7723 - RNA, 20 nt, synthetic construct
  misc_feature 1..20: note = spacer sequence
  source 1..20: mol_type = other RNA
ttttgctaaatccagctgcc

SEQ ID NO: 7724 - RNA, 20 nt, synthetic construct
  misc_feature 1..20: note = spacer sequence
  source 1..20: mol_type = other RNA
agctgccaagtcgcagcgct

SEQ ID NO: 7725 - RNA, 20 nt, synthetic construct
  misc_feature 1..20: note = spacer sequence
  source 1..20: mol_type = other RNA
cagcgctctttcttgatcca

SEQ ID NO: 7726 - RNA, 20 nt, synthetic construct
  misc_feature 1..20: note = spacer sequence
  source 1..20: mol_type = other RNA
ttcttgatccatcagtgtca

SEQ ID NO: 7727 - RNA, 20 nt, synthetic construct
  misc_feature 1..20: note = spacer sequence
  source 1..20: mol_type = other RNA
tgatccatcagtgtcatctg

SEQ ID NO: 7728 - RNA, 20 nt, synthetic construct
  misc_feature 1..20: note = spacer sequence
  source 1..20: mol_type = other RNA
agaaagagcgctgcgacttg

SEQ ID NO: 7729 - RNA, 20 nt, synthetic construct
  misc_feature 1..20: note = spacer sequence
  source 1..20: mol_type = other RNA
atcagtgtcatctgatagtt

SEQ ID NO: 7730 - RNA, 20 nt, synthetic construct
  misc_feature 1..20: note = spacer sequence
  source 1..20: mol_type = other RNA
gtgtcatctgatagttcacc

SEQ ID NO: 7731 - RNA, 20 nt, synthetic construct
  misc_feature 1..20: note = spacer sequence
  source 1..20: mol_type = other RNA
tctgatagttcacctctctc

SEQ ID NO: 7732 - RNA, 20 nt, synthetic construct
  misc_feature 1..20: note = spacer sequence
  source 1..20: mol_type = other RNA
gatagttcacctctctcccc

SEQ ID NO: 7733 - RNA, 20 nt, synthetic construct
  misc_feature 1..20: note = spacer sequence
  source 1..20: mol_type = other RNA
gatgacactgatggatcaag

SEQ ID NO: 7734 - RNA, 20 nt, synthetic construct
  misc_feature 1..20: note = spacer sequence
  source 1..20: mol_type = other RNA
cctctctccccctctttcct

SEQ ID NO: 7735 - RNA, 20 nt, synthetic construct
  misc_feature 1..20: note = spacer sequence
  source 1..20: mol_type = other RNA
ctccccctctttcctgccta

SEQ ID NO: 7736 - RNA, 20 nt, synthetic construct
  misc_feature 1..20: note = spacer sequence
  source 1..20: mol_type = other RNA
ccccctctttcctgcctaga

SEQ ID NO: 7737 - RNA, 20 nt, synthetic construct
  misc_feature 1..20: note = spacer sequence
  source 1..20: mol_type = other RNA
ccctctttcctgcctagaaa

SEQ ID NO: 7738 - RNA, 20 nt, synthetic construct
  misc_feature 1..20: note = spacer sequence
  source 1..20: mol_type = other RNA
ttcctgcctagaaactctac

SEQ ID NO: 7739 - RNA, 20 nt, synthetic construct
  misc_feature 1..20: note = spacer sequence
  source 1..20: mol_type = other RNA
tgcctagaaactctacttgg

SEQ ID NO: 7740 - RNA, 20 nt, synthetic construct
  misc_feature 1..20: note = spacer sequence
  source 1..20: mol_type = other RNA
aggcaggaaagagggggaga

SEQ ID NO: 7741 - RNA, 20 nt, synthetic construct
  misc_feature 1..20: note = spacer sequence
  source 1..20: mol_type = other RNA
acttggctttcagattatct

SEQ ID NO: 7742 - RNA, 20 nt, synthetic construct
  misc_feature 1..20: note = spacer sequence
  source 1..20: mol_type = other RNA
gattatctccctctacattt

SEQ ID NO: 7743 - RNA, 20 nt, synthetic construct
  misc_feature 1..20: note = spacer sequence
  source 1..20: mol_type = other RNA
gaaagccaagtagagtttct

SEQ ID NO: 7744 - RNA, 20 nt, synthetic construct
  misc_feature 1..20: note = spacer sequence
  source 1..20: mol_type = other RNA
ccctctacatttttatccta

SEQ ID NO: 7745 - RNA, 20 nt, synthetic construct
  misc_feature 1..20: note = spacer sequence
  source 1..20: mol_type = other RNA
ctctacatttttatcctagc

SEQ ID NO: 7746 - RNA, 20 nt, synthetic construct
  misc_feature 1..20: note = spacer sequence
  source 1..20: mol_type = other RNA
acatttttatcctagcccac

SEQ ID NO: 7747 - RNA, 20 nt, synthetic construct
  misc_feature 1..20: note = spacer sequence
  source 1..20: mol_type = other RNA
tagcccacgggctgtacctt

SEQ ID NO: 7748 - RNA, 20 nt, synthetic construct
  misc_feature 1..20: note = spacer sequence
  source 1..20: mol_type = other RNA
cagcatcctttgctggagag

SEQ ID NO: 7749 - RNA, 20 nt, synthetic construct
  misc_feature 1..20: note = spacer sequence
  source 1..20: mol_type = other RNA
gcatcctttgctggagagta

SEQ ID NO: 7750 - RNA, 20 nt, synthetic construct
  misc_feature 1..20: note = spacer sequence
  source 1..20: mol_type = other RNA
tttgctggagagtacagtat

SEQ ID NO: 7751 - RNA, 20 nt, synthetic construct
  misc_feature 1..20: note = spacer sequence
  source 1..20: mol_type = other RNA
agcaaaggatgctgagaagg

SEQ ID NO: 7752 - RNA, 20 nt, synthetic construct
  misc_feature 1..20: note = spacer sequence
  source 1..20: mol_type = other RNA
ccagcaaaggatgctgagaa

SEQ ID NO: 7753 - RNA, 20 nt, synthetic construct
  misc_feature 1..20: note = spacer sequence
  source 1..20: mol_type = other RNA
atactgtactctccagcaaa

SEQ ID NO: 7754 - RNA, 20 nt, synthetic construct
  misc_feature 1..20: note = spacer sequence
  source 1..20: mol_type = other RNA
aaagcacaggctcctgttgg

SEQ ID NO: 7755 - RNA, 20 nt, synthetic construct
  misc_feature 1..20: note = spacer sequence
  source 1..20: mol_type = other RNA
tgttggagtggggctacctt

SEQ ID NO: 7756 - RNA, 20 nt, synthetic construct
  misc_feature 1..20: note = spacer sequence
  source 1..20: mol_type = other RNA
aacaggagcctgtgcttttg

SEQ ID NO: 7757 - RNA, 20 nt, synthetic construct
  misc_feature 1..20: note = spacer sequence
  source 1..20: mol_type = other RNA
aggtagccccactccaacag

SEQ ID NO: 7758 - RNA, 20 nt, synthetic construct
  misc_feature 1..20: note = spacer sequence
  source 1..20: mol_type = other RNA
aacacggctacttgtagcta

SEQ ID NO: 7759 - RNA, 20 nt, synthetic construct
  misc_feature 1..20: note = spacer sequence
  source 1..20: mol_type = other RNA
catagctacaagtagccgtg

SEQ ID NO: 7760 - RNA, 20 nt, synthetic construct
  misc_feature 1..20: note = spacer sequence
  source 1..20: mol_type = other RNA
aagggtcacatagctacaag

SEQ ID NO: 7761 - RNA, 20 nt, synthetic construct
  misc_feature 1..20: note = spacer sequence
  source 1..20: mol_type = other RNA
tctccaagtgcttcagtctc

SEQ ID NO: 7762 - RNA, 20 nt, synthetic construct
  misc_feature 1..20: note = spacer sequence
  source 1..20: mol_type = other RNA
ccaagtgcttcagtctcccc

SEQ ID NO: 7763 - RNA, 20 nt, synthetic construct
  misc_feature 1..20: note = spacer sequence
  source 1..20: mol_type = other RNA
aagtgcttcagtctccccat

SEQ ID NO: 7764 - RNA, 20 nt, synthetic construct
  misc_feature 1..20: note = spacer sequence
  source 1..20: mol_type = other RNA
gtctccccatctataaaatg

SEQ ID NO: 7765 - RNA, 20 nt, synthetic construct
  misc_feature 1..20: note = spacer sequence
  source 1..20: mol_type = other RNA
ccccatctataaaatgaaga

SEQ ID NO: 7766 - RNA, 20 nt, synthetic construct
  misc_feature 1..20: note = spacer sequence
  source 1..20: mol_type = other RNA
ccatctataaaatgaagata

SEQ ID NO: 7767 - RNA, 20 nt, synthetic construct
  misc_feature 1..20: note = spacer sequence
  source 1..20: mol_type = other RNA
ataaaatgaagataaccctg

SEQ ID NO: 7768 - RNA, 20 nt, synthetic construct
  misc_feature 1..20: note = spacer sequence
  source 1..20: mol_type = other RNA
ttttatagatggggagactg

SEQ ID NO: 7769 - RNA, 20 nt, synthetic construct
  misc_feature 1..20: note = spacer sequence
  source 1..20: mol_type = other RNA
tcattttatagatggggaga

SEQ ID NO: 7770 - RNA, 20 nt, synthetic construct
  misc_feature 1..20: note = spacer sequence
  source 1..20: mol_type = other RNA
gggttatcttcattttatag

SEQ ID NO: 7771 - RNA, 20 nt, synthetic construct
  misc_feature 1..20: note = spacer sequence
  source 1..20: mol_type = other RNA
tttaacccttgcagccctca

SEQ ID NO: 7772 - RNA, 20 nt, synthetic construct
  misc_feature 1..20: note = spacer sequence
  source 1..20: mol_type = other RNA
taagcagtttgtgtatatta

SEQ ID NO: 7773 - RNA, 20 nt, synthetic construct
  misc_feature 1..20: note = spacer sequence
  source 1..20: mol_type = other RNA
ggcacgtggaactatgtcta

SEQ ID NO: 7774 - RNA, 20 nt, synthetic construct
  misc_feature 1..20: note = spacer sequence
  source 1..20: mol_type = other RNA
acgtgccagaaactcttaag

SEQ ID NO: 7775 - RNA, 20 nt, synthetic construct
  misc_feature 1..20: note = spacer sequence
  source 1..20: mol_type = other RNA
accttagtctcacagcatca

SEQ ID NO: 7776 - RNA, 20 nt, synthetic construct
  misc_feature 1..20: note = spacer sequence
  source 1..20: mol_type = other RNA
cacagcatcatattcttagc

SEQ ID NO: 7777 - RNA, 20 nt, synthetic construct
  misc_feature 1..20: note = spacer sequence
  source 1..20: mol_type = other RNA
cagcatcatattcttagctg

SEQ ID NO: 7778 - RNA, 20 nt, synthetic construct
  misc_feature 1..20: note = spacer sequence
  source 1..20: mol_type = other RNA
tattcttagctgccaaatgc

SEQ ID NO: 7779 - RNA, 20 nt, synthetic construct
  misc_feature 1..20: note = spacer sequence
  source 1..20: mol_type = other RNA
tagctgccaaatgctgaaga

SEQ ID NO: 7780 - RNA, 20 nt, synthetic construct
  misc_feature 1..20: note = spacer sequence
  source 1..20: mol_type = other RNA
gcatttggcagctaagaata

SEQ ID NO: 7781 - RNA, 20 nt, synthetic construct
  misc_feature 1..20: note = spacer sequence
  source 1..20: mol_type = other RNA
tcagcatttggcagctaaga

SEQ ID NO: 7782 - RNA, 20 nt, synthetic construct
  misc_feature 1..20: note = spacer sequence
  source 1..20: mol_type = other RNA
tcagacctctcaccacttct

SEQ ID NO: 7783 - RNA, 20 nt, synthetic construct
  misc_feature 1..20: note = spacer sequence
  source 1..20: mol_type = other RNA
gacctctcaccacttctcta

SEQ ID NO: 7784 - RNA, 20 nt, synthetic construct
  misc_feature 1..20: note = spacer sequence
  source 1..20: mol_type = other RNA
gaggacaaaattcttcagca

SEQ ID NO: 7785 - RNA, 20 nt, synthetic construct
  misc_feature 1..20: note = spacer sequence
  source 1..20: mol_type = other RNA
caccacttctctatttacat

SEQ ID NO: 7786 - RNA, 20 nt, synthetic construct
  misc_feature 1..20: note = spacer sequence
  source 1..20: mol_type = other RNA
ccacttctctatttacattt

SEQ ID NO: 7787 - RNA, 20 nt, synthetic construct
  misc_feature 1..20: note = spacer sequence
  source 1..20: mol_type = other RNA
ctatttacattttctcctta

SEQ ID NO: 7788 - RNA, 20 nt, synthetic construct
  misc_feature 1..20: note = spacer sequence
  source 1..20: mol_type = other RNA
atttacattttctccttagg

SEQ ID NO: 7789 - RNA, 20 nt, synthetic construct
  misc_feature 1..20: note = spacer sequence
  source 1..20: mol_type = other RNA
ccttaggtaatctcacaggc

SEQ ID NO: 7790 - RNA, 20 nt, synthetic construct
  misc_feature 1..20: note = spacer sequence
  source 1..20: mol_type = other RNA
ttaggtaatctcacaggctc

SEQ ID NO: 7791 - RNA, 20 nt, synthetic construct
  misc_feature 1..20: note = spacer sequence
  source 1..20: mol_type = other RNA
cacaggctcctgcggcttta

SEQ ID NO: 7792 - RNA, 20 nt, synthetic construct
  misc_feature 1..20: note = spacer sequence
  source 1..20: mol_type = other RNA
caggctcctgcggctttaaa

SEQ ID NO: 7793 - RNA, 20 nt, synthetic construct
  misc_feature 1..20: note = spacer sequence
  source 1..20: mol_type = other RNA
tgcggctttaaatattatct

SEQ ID NO: 7794 - RNA, 20 nt, synthetic construct
  misc_feature 1..20: note = spacer sequence
  source 1..20: mol_type = other RNA
ttatctgctgaagatgccag

SEQ ID NO: 7795 - RNA, 20 nt, synthetic construct
  misc_feature 1..20: note = spacer sequence
  source 1..20: mol_type = other RNA
gctgaagatgccagaatttg

SEQ ID NO: 7796 - RNA, 20 nt, synthetic construct
  misc_feature 1..20: note = spacer sequence
  source 1..20: mol_type = other RNA
gcagataaagataatattta

SEQ ID NO: 7797 - RNA, 20 nt, synthetic construct
  misc_feature 1..20: note = spacer sequence
  source 1..20: mol_type = other RNA
tcagcagataaagataatat

SEQ ID NO: 7798 - RNA, 20 nt, synthetic construct
  misc_feature 1..20: note = spacer sequence
  source 1..20: mol_type = other RNA
ggcatcttcagcagataaag

SEQ ID NO: 7799 - RNA, 20 nt, synthetic construct
  misc_feature 1..20: note = spacer sequence
  source 1..20: mol_type = other RNA
attagatgttaccagtagtt

SEQ ID NO: 7800 - RNA, 20 nt, synthetic construct
  misc_feature 1..20: note = spacer sequence
  source 1..20: mol_type = other RNA
aatagagctgcaaattctgg

SEQ ID NO: 7801 - RNA, 20 nt, synthetic construct
  misc_feature 1..20: note = spacer sequence
  source 1..20: mol_type = other RNA
agtaaactactggtaacatc

SEQ ID NO: 7802 - RNA, 20 nt, synthetic construct
  misc_feature 1..20: note = spacer sequence
  source 1..20: mol_type = other RNA
gtacctgggtatcaaagtta

SEQ ID NO: 7803 - RNA, 20 nt, synthetic construct
  misc_feature 1..20: note = spacer sequence
  source 1..20: mol_type = other RNA
aagttagaatatccaacatt

SEQ ID NO: 7804 - RNA, 20 nt, synthetic construct
  misc_feature 1..20: note = spacer sequence
  source 1..20: mol_type = other RNA
aactttgatacccaggtaca

SEQ ID NO: 7805 - RNA, 20 nt, synthetic construct
  misc_feature 1..20: note = spacer sequence
  source 1..20: mol_type = other RNA
aacattttaatttgataggc

SEQ ID NO: 7806 - RNA, 20 nt, synthetic construct
  misc_feature 1..20: note = spacer sequence
  source 1..20: mol_type = other RNA
aattaaaatgttggatattc

SEQ ID NO: 7807 - RNA, 20 nt, synthetic construct
  misc_feature 1..20: note = spacer sequence
  source 1..20: mol_type = other RNA
cctcaaacccactcctacag

SEQ ID NO: 7808 - RNA, 20 nt, synthetic construct
  misc_feature 1..20: note = spacer sequence
  source 1..20: mol_type = other RNA
aacccactcctacagatttg

SEQ ID NO: 7809 - RNA, 20 nt, synthetic construct
  misc_feature 1..20: note = spacer sequence
  source 1..20: mol_type = other RNA
tacagatttgcgcatcacag

SEQ ID NO: 7810 - RNA, 20 nt, synthetic construct
  misc_feature 1..20: note = spacer sequence
  source 1..20: mol_type = other RNA
gtaggagtgggtttgagggg

SEQ ID NO: 7811 - RNA, 20 nt, synthetic construct
  misc_feature 1..20: note = spacer sequence
  source 1..20: mol_type = other RNA
caggaatggcaattacatct

SEQ ID NO: 7812 - RNA, 20 nt, synthetic construct
  misc_feature 1..20: note = spacer sequence
  source 1..20: mol_type = other RNA
tgtgatgcgcaaatctgtag

SEQ ID NO: 7813 - RNA, 20 nt, synthetic construct
  misc_feature 1..20: note = spacer sequence
  source 1..20: mol_type = other RNA
accagttgctcacataaaaa

SEQ ID NO: 7814 - RNA, 20 nt, synthetic construct
  misc_feature 1..20: note = spacer sequence
  source 1..20: mol_type = other RNA
cataaaaaacgagtcattct

SEQ ID NO: 7815 - RNA, 20 nt, synthetic construct
  misc_feature 1..20: note = spacer sequence
  source 1..20: mol_type = other RNA
ttttttatgtgagcaactgg

SEQ ID NO: 7816 - RNA, 20 nt, synthetic construct
  misc_feature 1..20: note = spacer sequence
  source 1..20: mol_type = other RNA
ttcttgactctttttcgcat

SEQ ID NO: 7817 - RNA, 20 nt, synthetic construct
  misc_feature 1..20: note = spacer sequence
  source 1..20: mol_type = other RNA
tgactctttttcgcattccg

SEQ ID NO: 7818 - RNA, 20 nt, synthetic construct
  misc_feature 1..20: note = spacer sequence
  source 1..20: mol_type = other RNA
agaatgactcgttttttatg

SEQ ID NO: 7819 - RNA, 20 nt, synthetic construct
  misc_feature 1..20: note = spacer sequence
  source 1..20: mol_type = other RNA
ttttcgcattccgtatttaa

SEQ ID NO: 7820 - RNA, 20 nt, synthetic construct
  misc_feature 1..20: note = spacer sequence
  source 1..20: mol_type = other RNA
cattccgtatttaagtaata

SEQ ID NO: 7821 - RNA, 20 nt, synthetic construct
  misc_feature 1..20: note = spacer sequence
  source 1..20: mol_type = other RNA
gtatttaagtaatatggcaa

SEQ ID NO: 7822 - RNA, 20 nt, synthetic construct
  misc_feature 1..20: note = spacer sequence
  source 1..20: mol_type = other RNA
gaaggctctatcttcaaaat

SEQ ID NO: 7823 - RNA, 20 nt, synthetic construct
  misc_feature 1..20: note = spacer sequence
  source 1..20: mol_type = other RNA
gaattgccatattacttaaa

SEQ ID NO: 7824 - RNA, 20 nt, synthetic construct
  misc_feature 1..20: note = spacer sequence
  source 1..20: mol_type = other RNA
atcttcaaaatatcttcaga

SEQ ID NO: 7825 - RNA, 20 nt, synthetic construct
  misc_feature 1..20: note = spacer sequence
  source 1..20: mol_type = other RNA
tcaaaatatcttcagactct

SEQ ID NO: 7826 - RNA, 20 nt, synthetic construct
  misc_feature 1..20: note = spacer sequence
  source 1..20: mol_type = other RNA
aaatatcttcagactctaac

SEQ ID NO: 7827 - RNA, 20 nt, synthetic construct
  misc_feature 1..20: note = spacer sequence
  source 1..20: mol_type = other RNA
tcagactctaaccacttatc

SEQ ID NO: 7828 - RNA, 20 nt, synthetic construct
  misc_feature 1..20: note = spacer sequence
  source 1..20: mol_type = other RNA
gactctaaccacttatcacc

SEQ ID NO: 7829 - RNA, 20 nt, synthetic construct
  misc_feature 1..20: note = spacer sequence
  source 1..20: mol_type = other RNA
gaagatattttgaagataga

SEQ ID NO: 7830 - RNA, 20 nt, synthetic construct
  misc_feature 1..20: note = spacer sequence
  source 1..20: mol_type = other RNA
aaccacttatcacctccatt

SEQ ID NO: 7831 - RNA, 20 nt, synthetic construct
  misc_feature 1..20: note = spacer sequence
  source 1..20: mol_type = other RNA
cctccattgcaccagcccaa

SEQ ID NO: 7832 - RNA, 20 nt, synthetic construct
  misc_feature 1..20: note = spacer sequence
  source 1..20: mol_type = other RNA
attgcaccagcccaacgtgg

SEQ ID NO: 7833 - RNA, 20 nt, synthetic construct
  misc_feature 1..20: note = spacer sequence
  source 1..20: mol_type = other RNA
catctcatctgctgcaacag

SEQ ID NO: 7834 - RNA, 20 nt, synthetic construct
  misc_feature 1..20: note = spacer sequence
  source 1..20: mol_type = other RNA
catctgctgcaacagcatca

SEQ ID NO: 7835 - RNA, 20 nt, synthetic construct
  misc_feature 1..20: note = spacer sequence
  source 1..20: mol_type = other RNA
tctgctgcaacagcatcaga

SEQ ID NO: 7836 - RNA, 20 nt, synthetic construct
  misc_feature 1..20: note = spacer sequence
  source 1..20: mol_type = other RNA
gctgcaacagcatcagaacc

SEQ ID NO: 7837 - RNA, 20 nt, synthetic construct
  misc_feature 1..20: note = spacer sequence
  source 1..20: mol_type = other RNA
gaaccggtctcctttccact

SEQ ID NO: 7838 - RNA, 20 nt, synthetic construct
  misc_feature 1..20: note = spacer sequence
  source 1..20: mol_type = other RNA
gatgctgttgcagcagatga

SEQ ID NO: 7839 - RNA, 20 nt, synthetic construct
  misc_feature 1..20: note = spacer sequence
  source 1..20: mol_type = other RNA
cctttccactcttaccaact

SEQ ID NO: 7840 - RNA, 20 nt, synthetic construct
  misc_feature 1..20: note = spacer sequence
  source 1..20: mol_type = other RNA
tttccactcttaccaacttc

SEQ ID NO: 7841 - RNA, 20 nt, synthetic construct
  misc_feature 1..20: note = spacer sequence
  source 1..20: mol_type = other RNA
actcttaccaacttctagag

SEQ ID NO: 7842 - RNA, 20 nt, synthetic construct
  misc_feature 1..20: note = spacer sequence
  source 1..20: mol_type = other RNA
taccaacttctagagtctgt

SEQ ID NO: 7843 - RNA, 20 nt, synthetic construct
  misc_feature 1..20: note = spacer sequence
  source 1..20: mol_type = other RNA
agagtctgtttctctaacag

SEQ ID NO: 7844 - RNA, 20 nt, synthetic construct
  misc_feature 1..20: note = spacer sequence
  source 1..20: mol_type = other RNA
agaagttggtaagagtggaa

SEQ ID NO: 7845 - RNA, 20 nt, synthetic construct
  misc_feature 1..20: note = spacer sequence
  source 1..20: mol_type = other RNA
gtttctctaacagccacagt

SEQ ID NO: 7846 - RNA, 20 nt, synthetic construct
  misc_feature 1..20: note = spacer sequence
  source 1..20: mol_type = other RNA
ctaacagccacagtaatact

SEQ ID NO: 7847 - RNA, 20 nt, synthetic construct
  misc_feature 1..20: note = spacer sequence
  source 1..20: mol_type = other RNA
aacagccacagtaatacttt

SEQ ID NO: 7848 - RNA, 20 nt, synthetic construct
  misc_feature 1..20: note = spacer sequence
  source 1..20: mol_type = other RNA
gatcatggcatggataaaag

SEQ ID NO: 7849 - RNA, 20 nt, synthetic construct
  misc_feature 1..20: note = spacer sequence
  source 1..20: mol_type = other RNA
gatgtgcagtttttaaagta

SEQ ID NO: 7850 - RNA, 20 nt, synthetic construct
  misc_feature 1..20: note = spacer sequence
  source 1..20: mol_type = other RNA
tggcatggataaaagactct

SEQ ID NO: 7851 - RNA, 20 nt, synthetic construct
  misc_feature 1..20: note = spacer sequence
  source 1..20: mol_type = other RNA
atgccatgatctgatgtgca

SEQ ID NO: 7852 - RNA, 20 nt, synthetic construct
  misc_feature 1..20: note = spacer sequence
  source 1..20: mol_type = other RNA
tttatccatgccatgatctg

SEQ ID NO: 7853 - RNA, 20 nt, synthetic construct
  misc_feature 1..20: note = spacer sequence
  source 1..20: mol_type = other RNA
acaccatttcccactgcact

SEQ ID NO: 7854 - RNA, 20 nt, synthetic construct
  misc_feature 1..20: note = spacer sequence
  source 1..20: mol_type = other RNA
cactgcactcaaagcctagt

SEQ ID NO: 7855 - RNA, 20 nt, synthetic construct
  misc_feature 1..20: note = spacer sequence
  source 1..20: mol_type = other RNA
aagcctagtgctcaacaacc

SEQ ID NO: 7856 - RNA, 20 nt, synthetic construct
  misc_feature 1..20: note = spacer sequence
  source 1..20: mol_type = other RNA
acaaccttctctaagctcat

SEQ ID NO: 7857 - RNA, 20 nt, synthetic construct
  misc_feature 1..20: note = spacer sequence
  source 1..20: mol_type = other RNA
ctaagctcatctcctgccac

SEQ ID NO: 7858 - RNA, 20 nt, synthetic construct
  misc_feature 1..20: note = spacer sequence
  source 1..20: mol_type = other RNA
aagctcatctcctgccactt

SEQ ID NO: 7859 - RNA, 20 nt, synthetic construct
  misc_feature 1..20: note = spacer sequence
  source 1..20: mol_type = other RNA
tctcctgccactttcttccc

SEQ ID NO: 7860 - RNA, 20 nt, synthetic construct
  misc_feature 1..20: note = spacer sequence
  source 1..20: mol_type = other RNA
cctgccactttcttcccttt

SEQ ID NO: 7861 - RNA, 20 nt, synthetic construct
  misc_feature 1..20: note = spacer sequence
  source 1..20: mol_type = other RNA
tgccactttcttccctttgc

SEQ ID NO: 7862 - RNA, 20 nt, synthetic construct
  misc_feature 1..20: note = spacer sequence
  source 1..20: mol_type = other RNA
tccctttgctctcccttcct

SEQ ID NO: 7863 - RNA, 20 nt, synthetic construct
  misc_feature 1..20: note = spacer sequence
  source 1..20: mol_type = other RNA
ctttgctctcccttcctgct

SEQ ID NO: 7864 - RNA, 20 nt, synthetic construct
  misc_feature 1..20: note = spacer sequence
  source 1..20: mol_type = other RNA
cccttcctgctgtggtcctt

SEQ ID NO: 7865 - RNA, 20 nt, synthetic construct
  misc_feature 1..20: note = spacer sequence
  source 1..20: mol_type = other RNA
cttcctgctgtggtccttca

SEQ ID NO: 7866 - RNA, 20 nt, synthetic construct
  misc_feature 1..20: note = spacer sequence
  source 1..20: mol_type = other RNA
tgctgtggtccttcaacaat

SEQ ID NO: 7867 - RNA, 20 nt, synthetic construct
  misc_feature 1..20: note = spacer sequence
  source 1..20: mol_type = other RNA
ttcaacaatccatgccccat

SEQ ID NO: 7868 - RNA, 20 nt, synthetic construct
  misc_feature 1..20: note = spacer sequence
  source 1..20: mol_type = other RNA
acaatccatgccccatctca

SEQ ID NO: 7869 - RNA, 20 nt, synthetic construct
  misc_feature 1..20: note = spacer sequence
  source 1..20: mol_type = other RNA
atgccccatctcaattcagg

SEQ ID NO: 7870 - RNA, 20 nt, synthetic construct
  misc_feature 1..20: note = spacer sequence
  source 1..20: mol_type = other RNA
caattcaggccccctttcct

SEQ ID NO: 7871 - RNA, 20 nt, synthetic construct
  misc_feature 1..20: note = spacer sequence
  source 1..20: mol_type = other RNA
attcaggccccctttccttt

SEQ ID NO: 7872 - RNA, 20 nt, synthetic construct
  misc_feature 1..20: note = spacer sequence
  source 1..20: mol_type = other RNA
ggccccctttcctttggtcc

SEQ ID NO: 7873 - RNA, 20 nt, synthetic construct
  misc_feature 1..20: note = spacer sequence
  source 1..20: mol_type = other RNA
tttggtcctcactctacatt

SEQ ID NO: 7874 - RNA, 20 nt, synthetic construct
  misc_feature 1..20: note = spacer sequence
  source 1..20: mol_type = other RNA
tcactctacattcctttcct

SEQ ID NO: 7875 - RNA, 20 nt, synthetic construct
  misc_feature 1..20: note = spacer sequence
  source 1..20: mol_type = other RNA
ctctacattcctttcctctg

SEQ ID NO: 7876 - RNA, 20 nt, synthetic construct
  misc_feature 1..20: note = spacer sequence
  source 1..20: mol_type = other RNA
acattcctttcctctgtatt

SEQ ID NO: 7877 - RNA, 20 nt, synthetic construct
  misc_feature 1..20: note = spacer sequence
  source 1..20: mol_type = other RNA
tttcctctgtatttacatgg

SEQ ID NO: 7878 - RNA, 20 nt, synthetic construct
  misc_feature 1..20: note = spacer sequence
  source 1..20: mol_type = other RNA
tctgtatttacatggggata

SEQ ID NO: 7879 - RNA, 20 nt, synthetic construct
  misc_feature 1..20: note = spacer sequence
  source 1..20: mol_type = other RNA
gtatttacatggggatattc

SEQ ID NO: 7880 - RNA, 20 nt, synthetic construct
  misc_feature 1..20: note = spacer sequence
  source 1..20: mol_type = other RNA
ccatgtaaatacagaggaaa

SEQ ID NO: 7881 - RNA, 20 nt, synthetic construct
  misc_feature 1..20: note = spacer sequence
  source 1..20: mol_type = other RNA
cttcattactggttcagatg

SEQ ID NO: 7882 - RNA, 20 nt, synthetic construct
  misc_feature 1..20: note = spacer sequence
  source 1..20: mol_type = other RNA
tcattactggttcagatgcc

SEQ ID NO: 7883 - RNA, 20 nt, synthetic construct
  misc_feature 1..20: note = spacer sequence
  source 1..20: mol_type = other RNA
ttactggttcagatgccttc

SEQ ID NO: 7884 - RNA, 20 nt, synthetic construct
  misc_feature 1..20: note = spacer sequence
  source 1..20: mol_type = other RNA
gatgccttccctagcaatcg

SEQ ID NO: 7885 - RNA, 20 nt, synthetic construct
  misc_feature 1..20: note = spacer sequence
  source 1..20: mol_type = other RNA
gaaccagtaatgaagagaat

SEQ ID NO: 7886 - RNA, 20 nt, synthetic construct
  misc_feature 1..20: note = spacer sequence
  source 1..20: mol_type = other RNA
ctagcaatcgtatttaaaat

SEQ ID NO: 7887 - RNA, 20 nt, synthetic construct
  misc_feature 1..20: note = spacer sequence
  source 1..20: mol_type = other RNA
tatttaaaattgtacatatc

SEQ ID NO: 7888 - RNA, 20 nt, synthetic construct
  misc_feature 1..20: note = spacer sequence
  source 1..20: mol_type = other RNA
gtgttacacccttatactgc

SEQ ID NO: 7889 - RNA, 20 nt, synthetic construct
  misc_feature 1..20: note = spacer sequence
  source 1..20: mol_type = other RNA
tgttttactctccatgttaa

SEQ ID NO: 7890 - RNA, 20 nt, synthetic construct
  misc_feature 1..20: note = spacer sequence
  source 1..20: mol_type = other RNA
ccatgttaaattattagccc

SEQ ID NO: 7891 - RNA, 20 nt, synthetic construct
  misc_feature 1..20: note = spacer sequence
  source 1..20: mol_type = other RNA
atgttaaattattagcccag

SEQ ID NO: 7892 - RNA, 20 nt, synthetic construct
  misc_feature 1..20: note = spacer sequence
  source 1..20: mol_type = other RNA
gcgaaaatataaactccaga

SEQ ID NO: 7893 - RNA, 20 nt, synthetic construct
  misc_feature 1..20: note = spacer sequence
  source 1..20: mol_type = other RNA
cagacctgggctaataattt

SEQ ID NO: 7894 - RNA, 20 nt, synthetic construct
  misc_feature 1..20: note = spacer sequence
  source 1..20: mol_type = other RNA
agaaagacaggttttgtttt

SEQ ID NO: 7895 - RNA, 20 nt, synthetic construct
  misc_feature 1..20: note = spacer sequence
  source 1..20: mol_type = other RNA
ggagtttatattttcgcaga

SEQ ID NO: 7896 - RNA, 20 nt, synthetic construct
  misc_feature 1..20: note = spacer sequence
  source 1..20: mol_type = other RNA
ttctggagtttatattttcg

SEQ ID NO: 7897 - RNA, 20 nt, synthetic construct
  misc_feature 1..20: note = spacer sequence
  source 1..20: mol_type = other RNA
ttctggtatttctagtatac

SEQ ID NO: 7898 - RNA, 20 nt, synthetic construct
  misc_feature 1..20: note = spacer sequence
  source 1..20: mol_type = other RNA
ggtatttctagtatacctag

SEQ ID NO: 7899 - RNA, 20 nt, synthetic construct
  misc_feature 1..20: note = spacer sequence
  source 1..20: mol_type = other RNA
agtatacctagaagggtgcc

SEQ ID NO: 7900 - RNA, 20 nt, synthetic construct
  misc_feature 1..20: note = spacer sequence
  source 1..20: mol_type = other RNA
aggtatactagaaataccag

SEQ ID NO: 7901 - RNA, 20 nt, synthetic construct
  misc_feature 1..20: note = spacer sequence
  source 1..20: mol_type = other RNA
ataaccattgtgtgccaggc

SEQ ID NO: 7902 - RNA, 20 nt, synthetic construct
  misc_feature 1..20: note = spacer sequence
  source 1..20: mol_type = other RNA
aatcaataaccattgtgtgc

SEQ ID NO: 7903 - RNA, 20 nt, synthetic construct
  misc_feature 1..20: note = spacer sequence
  source 1..20: mol_type = other RNA
ataaatatctaatcaataac

SEQ ID NO: 7904 - RNA, 20 nt, synthetic construct
  misc_feature 1..20: note = spacer sequence
  source 1..20: mol_type = other RNA
tatgttcaataaatatctaa

SEQ ID NO: 7905 - RNA, 20 nt, synthetic construct
  misc_feature 1..20: note = spacer sequence
  source 1..20: mol_type = other RNA
ctcatatgttcaataaatat

SEQ ID NO: 7906 - RNA, 20 nt, synthetic construct
  misc_feature 1..20: note = spacer sequence
  source 1..20: mol_type = other RNA
gcaaacaccattcactcata

SEQ ID NO: 7907 - RNA, 20 nt, synthetic construct
  misc_feature 1..20: note = spacer sequence
  source 1..20: mol_type = other RNA
cctctgcaaacaccattcac

SEQ ID NO: 7908 - RNA, 20 nt, synthetic construct
  misc_feature 1..20: note = spacer sequence
  source 1..20: mol_type = other RNA
tcacctctgcaaacaccatt

SEQ ID NO: 7909 - RNA, 20 nt, synthetic construct
  misc_feature 1..20: note = spacer sequence
  source 1..20: mol_type = other RNA
tcaaggagaagatacctctc

SEQ ID NO: 7910 - RNA, 20 nt, synthetic construct
  misc_feature 1..20: note = spacer sequence
  source 1..20: mol_type = other RNA
aggagaagatacctctcagg

SEQ ID NO: 7911 - RNA, 20 nt, synthetic construct
  misc_feature 1..20: note = spacer sequence
  source 1..20: mol_type = other RNA
ttgatgagtttggtcatcac

SEQ ID NO: 7912 - RNA, 20 nt, synthetic construct
  misc_feature 1..20: note = spacer sequence
  source 1..20: mol_type = other RNA
ccttgatgagtttggtcatc

SEQ ID NO: 7913 - RNA, 20 nt, synthetic construct
  misc_feature 1..20: note = spacer sequence
  source 1..20: mol_type = other RNA
tctccttgatgagtttggtc

SEQ ID NO: 7914 - RNA, 20 nt, synthetic construct
  misc_feature 1..20: note = spacer sequence
  source 1..20: mol_type = other RNA
cagggaattaagaatagagg

SEQ ID NO: 7915 - RNA, 20 nt, synthetic construct
  misc_feature 1..20: note = spacer sequence
  source 1..20: mol_type = other RNA
gggaattaagaatagaggct

SEQ ID NO: 7916 - RNA, 20 nt, synthetic construct
  misc_feature 1..20: note = spacer sequence
  source 1..20: mol_type = other RNA
ctgagaggtatcttctcctt

SEQ ID NO: 7917 - RNA, 20 nt, synthetic construct
  misc_feature 1..20: note = spacer sequence
  source 1..20: mol_type = other RNA
taattccctgagaggtatct

SEQ ID NO: 7918 - RNA, 20 nt, synthetic construct
  misc_feature 1..20: note = spacer sequence
  source 1..20: mol_type = other RNA
attcttaattccctgagagg

SEQ ID NO: 7919 - RNA, 20 nt, synthetic construct
  misc_feature 1..20: note = spacer sequence
  source 1..20: mol_type = other RNA
aggtcttttcccagggtggt

SEQ ID NO: 7920 - RNA, 20 nt, synthetic construct
  misc_feature 1..20: note = spacer sequence
  source 1..20: mol_type = other RNA
tttcccagggtggtaagaat

SEQ ID NO: 7921 - RNA, 20 nt, synthetic construct
  misc_feature 1..20: note = spacer sequence
  source 1..20: mol_type = other RNA
cagggtggtaagaatcttcc

SEQ ID NO: 7922 - RNA, 20 nt, synthetic construct
  misc_feature 1..20: note = spacer sequence
  source 1..20: mol_type = other RNA
taccaccctgggaaaagacc

SEQ ID NO: 7923 - RNA, 20 nt, synthetic construct
  misc_feature 1..20: note = spacer sequence
  source 1..20: mol_type = other RNA
tcccagcataaacctaggag

SEQ ID NO: 7924 - RNA, 20 nt, synthetic construct
  misc_feature 1..20: note = spacer sequence
  source 1..20: mol_type = other RNA
cagcataaacctaggaggac

SEQ ID NO: 7925 - RNA, 20 nt, synthetic construct
  misc_feature 1..20: note = spacer sequence
  source 1..20: mol_type = other RNA
taggtttatgctgggaagat

SEQ ID NO: 7926 - RNA, 20 nt, synthetic construct
  misc_feature 1..20: note = spacer sequence
  source 1..20: mol_type = other RNA
tcctaggtttatgctgggaa

SEQ ID NO: 7927 - RNA, 20 nt, synthetic construct
  misc_feature 1..20: note = spacer sequence
  source 1..20: mol_type = other RNA
agtcctcctaggtttatgct

SEQ ID NO: 7928 - RNA, 20 nt, synthetic construct
  misc_feature 1..20: note = spacer sequence
  source 1..20: mol_type = other RNA
aagttcaagtcctcctaggt

SEQ ID NO: 7929 - RNA, 20 nt, synthetic construct
  misc_feature 1..20: note = spacer sequence
  source 1..20: mol_type = other RNA
caaagttcaagtcctcctag

SEQ ID NO: 7930 - RNA, 20 nt, synthetic construct
  misc_feature 1..20: note = spacer sequence
  source 1..20: mol_type = other RNA
tttctcaaagttcaagtcct

SEQ ID NO: 7931 - RNA, 20 nt, synthetic construct
  misc_feature 1..20: note = spacer sequence
  source 1..20: mol_type = other RNA
ttcaacctccttttctgttc

SEQ ID NO: 7932 - RNA, 20 nt, synthetic construct
  misc_feature 1..20: note = spacer sequence
  source 1..20: mol_type = other RNA
acctccttttctgttctttg

SEQ ID NO: 7933 - RNA, 20 nt, synthetic construct
  misc_feature 1..20: note = spacer sequence
  source 1..20: mol_type = other RNA
ttttctgttctttgttgcag

SEQ ID NO: 7934 - RNA, 20 nt, synthetic construct
  misc_feature 1..20: note = spacer sequence
  source 1..20: mol_type = other RNA
gttctttgttgcagttccac

SEQ ID NO: 7935 - RNA, 20 nt, synthetic construct
  misc_feature 1..20: note = spacer sequence
  source 1..20: mol_type = other RNA
ttgttgcagttccaccgttt

SEQ ID NO: 7936 - RNA, 20 nt, synthetic construct
  misc_feature 1..20: note = spacer sequence
  source 1..20: mol_type = other RNA
accgttttgatttgatctct

SEQ ID NO: 7937 - RNA, 20 nt, synthetic construct
  misc_feature 1..20: note = spacer sequence
  source 1..20: mol_type = other RNA
aaacggtggaactgcaacaa

SEQ ID NO: 7938 - RNA, 20 nt, synthetic construct
  misc_feature 1..20: note = spacer sequence
  source 1..20: mol_type = other RNA
aatcaaaacggtggaactgc

SEQ ID NO: 7939 - RNA, 20 nt, synthetic construct
  misc_feature 1..20: note = spacer sequence
  source 1..20: mol_type = other RNA
ctacagaatgagtgtcactg

SEQ ID NO: 7940 - RNA, 20 nt, synthetic construct
  misc_feature 1..20: note = spacer sequence
  source 1..20: mol_type = other RNA
acagaatgagtgtcactgtg

SEQ ID NO: 7941 - RNA, 20 nt, synthetic construct
  misc_feature 1..20: note = spacer sequence
  source 1..20: mol_type = other RNA
gtagagatcaaatcaaaacg

SEQ ID NO: 7942 - RNA, 20 nt, synthetic construct
  misc_feature 1..20: note = spacer sequence
  source 1..20: mol_type = other RNA
ttctgtagagatcaaatcaa

SEQ ID NO: 7943 - RNA, 20 nt, synthetic construct
  misc_feature 1..20: note = spacer sequence
  source 1..20: mol_type = other RNA
ctgtggcactttgcatgaac

SEQ ID NO: 7944 - RNA, 20 nt, synthetic construct
  misc_feature 1..20: note = spacer sequence
  source 1..20: mol_type = other RNA
tgcaaagtgccacagtgaca

SEQ ID NO: 7945 - RNA, 20 nt, synthetic construct
  misc_feature 1..20: note = spacer sequence
  source 1..20: mol_type = other RNA
tgtttagttcatgcaaagtg

SEQ ID NO: 7946 - RNA, 20 nt, synthetic construct
  misc_feature 1..20: note = spacer sequence
  source 1..20: mol_type = other RNA
cacatgaagaaaaagatgta

SEQ ID NO: 7947 - RNA, 20 nt, synthetic construct
  misc_feature 1..20: note = spacer sequence
  source 1..20: mol_type = other RNA
tgtgggaaaagttcatgttt

SEQ ID NO: 7948 - RNA, 20 nt, synthetic construct
  misc_feature 1..20: note = spacer sequence
  source 1..20: mol_type = other RNA
tcatgtgggaaaagttcatg

SEQ ID NO: 7949 - RNA, 20 nt, synthetic construct
  misc_feature 1..20: note = spacer sequence
  source 1..20: mol_type = other RNA
ttttcttcatgtgggaaaag

SEQ ID NO: 7950 - RNA, 20 nt, synthetic construct
  misc_feature 1..20: note = spacer sequence
  source 1..20: mol_type = other RNA
accactcatctctttcatca

SEQ ID NO: 7951 - RNA, 20 nt, synthetic construct
  misc_feature 1..20: note = spacer sequence
  source 1..20: mol_type = other RNA
tctctttcatcaatacctga

SEQ ID NO: 7952 - RNA, 20 nt, synthetic construct
  misc_feature 1..20: note = spacer sequence
  source 1..20: mol_type = other RNA
ctttcatcaatacctgaaga

SEQ ID NO: 7953 - RNA, 20 nt, synthetic construct
  misc_feature 1..20: note = spacer sequence
  source 1..20: mol_type = other RNA
ttcatcaatacctgaagatc

SEQ ID NO: 7954 - RNA, 20 nt, synthetic construct
  misc_feature 1..20: note = spacer sequence
  source 1..20: mol_type = other RNA
tcaatacctgaagatcccta

SEQ ID NO: 7955 - RNA, 20 nt, synthetic construct
  misc_feature 1..20: note = spacer sequence
  source 1..20: mol_type = other RNA
atacctgaagatccctaagc

SEQ ID NO: 7956 - RNA, 20 nt, synthetic construct
  misc_feature 1..20: note = spacer sequence
  source 1..20: mol_type = other RNA
ggtattgatgaaagagatga

SEQ ID NO: 7957 - RNA, 20 nt, synthetic construct
  misc_feature 1..20: note = spacer sequence
  source 1..20: mol_type = other RNA
tcaggtattgatgaaagaga

SEQ ID NO: 7958 - RNA, 20 nt, synthetic construct
  misc_feature 1..20: note = spacer sequence
  source 1..20: mol_type = other RNA
ctaagcatatatccctaggt

SEQ ID NO: 7959 - RNA, 20 nt, synthetic construct
  misc_feature 1..20: note = spacer sequence
  source 1..20: mol_type = other RNA
ctaggttttttttttaatca

SEQ ID NO: 7960 - RNA, 20 nt, synthetic construct
  misc_feature 1..20: note = spacer sequence
  source 1..20: mol_type = other RNA
gcaagtattatcctttttcc

SEQ ID NO: 7961 - RNA, 20 nt, synthetic construct
  misc_feature 1..20: note = spacer sequence
  source 1..20: mol_type = other RNA
tttttccatttcagacctgc

SEQ ID NO: 7962 - RNA, 20 nt, synthetic construct
  misc_feature 1..20: note = spacer sequence
  source 1..20: mol_type = other RNA
atttcagacctgcagaaaac

SEQ ID NO: 7963 - RNA, 20 nt, synthetic construct
  misc_feature 1..20: note = spacer sequence
  source 1..20: mol_type = other RNA
gacctgcagaaaactgaaat

SEQ ID NO: 7964 - RNA, 20 nt, synthetic construct
  misc_feature 1..20: note = spacer sequence
  source 1..20: mol_type = other RNA
gaaatggaaaaaggataata

SEQ ID NO: 7965 - RNA, 20 nt, synthetic construct
  misc_feature 1..20: note = spacer sequence
  source 1..20: mol_type = other RNA
gcaggtctgaaatggaaaaa

SEQ ID NO: 7966 - RNA, 20 nt, synthetic construct
  misc_feature 1..20: note = spacer sequence
  source 1..20: mol_type = other RNA
gttttctgcaggtctgaaat

SEQ ID NO: 7967 - RNA, 20 nt, synthetic construct
  misc_feature 1..20: note = spacer sequence
  source 1..20: mol_type = other RNA
tttgcatagattcaccaata

SEQ ID NO: 7968 - RNA, 20 nt, synthetic construct
  misc_feature 1..20: note = spacer sequence
  source 1..20: mol_type = other RNA
atgcaaaggaaataacatgt

SEQ ID NO: 7969 - RNA, 20 nt, synthetic construct
  misc_feature 1..20: note = spacer sequence
  source 1..20: mol_type = other RNA
ccaataacatttaggcctat

SEQ ID NO: 7970 - RNA, 20 nt, synthetic construct
  misc_feature 1..20: note = spacer sequence
  source 1..20: mol_type = other RNA
gaaaacactcctgggttatt

SEQ ID NO: 7971 - RNA, 20 nt, synthetic construct
  misc_feature 1..20: note = spacer sequence
  source 1..20: mol_type = other RNA
gaataaataggcctaaatgt

SEQ ID NO: 7972 - RNA, 20 nt, synthetic construct
  misc_feature 1..20: note = spacer sequence
  source 1..20: mol_type = other RNA
tgggttattcttatagaagg

SEQ ID NO: 7973 - RNA, 20 nt, synthetic construct
  misc_feature 1..20: note = spacer sequence
  source 1..20: mol_type = other RNA
tatagaaggcactatgttct

SEQ ID NO: 7974 - RNA, 20 nt, synthetic construct
  misc_feature 1..20: note = spacer sequence
  source 1..20: mol_type = other RNA
ataagaataacccaggagtg

SEQ ID NO: 7975 - RNA, 20 nt, synthetic construct
  misc_feature 1..20: note = spacer sequence
  source 1..20: mol_type = other RNA
gagagctgcggaaaatggaa

SEQ ID NO: 7976 - RNA, 20 nt, synthetic construct
  misc_feature 1..20: note = spacer sequence
  source 1..20: mol_type = other RNA
gaacatagtgccttctataa

SEQ ID NO: 7977 - RNA, 20 nt, synthetic construct
  misc_feature 1..20: note = spacer sequence
  source 1..20: mol_type = other RNA
cagaacatagtgccttctat

SEQ ID NO: 7978 - RNA, 20 nt, synthetic construct
  misc_feature 1..20: note = spacer sequence
  source 1..20: mol_type = other RNA
gcagctctcagaacatagtg

SEQ ID NO: 7979 - RNA, 20 nt, synthetic construct
  misc_feature 1..20: note = spacer sequence
  source 1..20: mol_type = other RNA
attttccgcagctctcagaa

SEQ ID NO: 7980 - RNA, 20 nt, synthetic construct
  misc_feature 1..20: note = spacer sequence
  source 1..20: mol_type = other RNA
tccattttccgcagctctca

SEQ ID NO: 7981 - RNA, 20 nt, synthetic construct
  misc_feature 1..20: note = spacer sequence
  source 1..20: mol_type = other RNA
ttattcttccattttccgca

SEQ ID NO: 7982 - RNA, 20 nt, synthetic construct
  misc_feature 1..20: note = spacer sequence
  source 1..20: mol_type = other RNA
aagaatgagaaaaagcatct

SEQ ID NO: 7983 - RNA, 20 nt, synthetic construct
  misc_feature 1..20: note = spacer sequence
  source 1..20: mol_type = other RNA
ttgaaaattggctccttatt

SEQ ID NO: 7984 - RNA, 20 nt, synthetic construct
  misc_feature 1..20: note = spacer sequence
  source 1..20: mol_type = other RNA
ttctttgaaaattggctcct

SEQ ID NO: 7985 - RNA, 20 nt, synthetic construct
  misc_feature 1..20: note = spacer sequence
  source 1..20: mol_type = other RNA
cattctttgaaaattggctc

SEQ ID NO: 7986 - RNA, 20 nt, synthetic construct
  misc_feature 1..20: note = spacer sequence
  source 1..20: mol_type = other RNA
ttcagattgtattatacatt

SEQ ID NO: 7987 - RNA, 20 nt, synthetic construct
  misc_feature 1..20: note = spacer sequence
  source 1..20: mol_type = other RNA
gattgtattatacattaaga

SEQ ID NO: 7988 - RNA, 20 nt, synthetic construct
  misc_feature 1..20: note = spacer sequence
  source 1..20: mol_type = other RNA
gaaagatgctttttctcatt

SEQ ID NO: 7989 - RNA, 20 nt, synthetic construct
  misc_feature 1..20: note = spacer sequence
  source 1..20: mol_type = other RNA
taatgtataatacaatctga

SEQ ID NO: 7990 - RNA, 20 nt, synthetic construct
  misc_feature 1..20: note = spacer sequence
  source 1..20: mol_type = other RNA
tttttaaaatataatcttaa

SEQ ID NO: 7991 - RNA, 20 nt, synthetic construct
  misc_feature 1..20: note = spacer sequence
  source 1..20: mol_type = other RNA
aagcatcatttttaaaatat

SEQ ID NO: 7992 - RNA, 20 nt, synthetic construct
  misc_feature 1..20: note = spacer sequence
  source 1..20: mol_type = other RNA
tgctaacattctaagcatca

SEQ ID NO: 7993 - RNA, 20 nt, synthetic construct
  misc_feature 1..20: note = spacer sequence
  source 1..20: mol_type = other RNA
cttgctaacattctaagcat

SEQ ID NO: 7994 - RNA, 20 nt, synthetic construct
  misc_feature 1..20: note = spacer sequence
  source 1..20: mol_type = other RNA
taagagaaatttgagttttc

SEQ ID NO: 7995 - RNA, 20 nt, synthetic construct
  misc_feature 1..20: note = spacer sequence
  source 1..20: mol_type = other RNA
taagaatctcttgctaacat

SEQ ID NO: 7996 - RNA, 20 nt, synthetic construct
  misc_feature 1..20: note = spacer sequence
  source 1..20: mol_type = other RNA
cttaagaatctcttgctaac

SEQ ID NO: 7997 - RNA, 20 nt, synthetic construct
  misc_feature 1..20: note = spacer sequence
  source 1..20: mol_type = other RNA
aatttctcttaagaatctct

SEQ ID NO: 7998 - RNA, 20 nt, synthetic construct
  misc_feature 1..20: note = spacer sequence
  source 1..20: mol_type = other RNA
ataatatataatgcagatat

SEQ ID NO: 7999 - RNA, 20 nt, synthetic construct
  misc_feature 1..20: note = spacer sequence
  source 1..20: mol_type = other RNA
gcattatatattattgaaaa

SEQ ID NO: 8000 - RNA, 20 nt, synthetic construct
  misc_feature 1..20: note = spacer sequence
  source 1..20: mol_type = other RNA
gtatatctgcattatatatt

SEQ ID NO: 8001 - RNA, 20 nt, synthetic construct
  misc_feature 1..20: note = spacer sequence
  source 1..20: mol_type = other RNA
cagtatatctgcattatata

SEQ ID NO: 8002 - RNA, 20 nt, synthetic construct
  misc_feature 1..20: note = spacer sequence
  source 1..20: mol_type = other RNA
catctcagtatatctgcatt

SEQ ID NO: 8003 - RNA, 20 nt, synthetic construct
  misc_feature 1..20: note = spacer sequence
  source 1..20: mol_type = other RNA
tctatttttggcataagggt

SEQ ID NO: 8004 - RNA, 20 nt, synthetic construct
  misc_feature 1..20: note = spacer sequence
  source 1..20: mol_type = other RNA
atttttggcataagggtata

SEQ ID NO: 8005 - RNA, 20 nt, synthetic construct
  misc_feature 1..20: note = spacer sequence
  source 1..20: mol_type = other RNA
aaatatacccttatgccaaa

SEQ ID NO: 8006 - RNA, 20 nt, synthetic construct
  misc_feature 1..20: note = spacer sequence
  source 1..20: mol_type = other RNA
aatacatgaaaaacagaatt

SEQ ID NO: 8007 - RNA, 20 nt, synthetic construct
  misc_feature 1..20: note = spacer sequence
  source 1..20: mol_type = other RNA
tgtattagatgttatcaaaa

SEQ ID NO: 8008 - RNA, 20 nt, synthetic construct
  misc_feature 1..20: note = spacer sequence
  source 1..20: mol_type = other RNA
gtttttcatgtattagatgt

SEQ ID NO: 8009 - RNA, 20 nt, synthetic construct
  misc_feature 1..20: note = spacer sequence
  source 1..20: mol_type = other RNA
cttataattctgtttttcat

SEQ ID NO: 8010 - RNA, 20 nt, synthetic construct
  misc_feature 1..20: note = spacer sequence
  source 1..20: mol_type = other RNA
aatttcacttataattctgt

SEQ ID NO: 8011 - RNA, 20 nt, synthetic construct
  misc_feature 1..20: note = spacer sequence
  source 1..20: mol_type = other RNA
ccaatttcacttataattct

SEQ ID NO: 8012 - RNA, 20 nt, synthetic construct
  misc_feature 1..20: note = spacer sequence
  source 1..20: mol_type = other RNA
ttctccaatttcacttataa

SEQ ID NO: 8013 - RNA, 20 nt, synthetic construct
  misc_feature 1..20: note = spacer sequence
  source 1..20: mol_type = other RNA
aaataatgtacagtaggctc

SEQ ID NO: 8014 - RNA, 20 nt, synthetic construct
  misc_feature 1..20: note = spacer sequence
  source 1..20: mol_type = other RNA
gcatggtcaacttcctacag

SEQ ID NO: 8015 - RNA, 20 nt, synthetic construct
  misc_feature 1..20: note = spacer sequence
  source 1..20: mol_type = other RNA
acttcctacagatttgcttt

SEQ ID NO: 8016 - RNA, 20 nt, synthetic construct
  misc_feature 1..20: note = spacer sequence
  source 1..20: mol_type = other RNA
tacagatttgctttttggaa

SEQ ID NO: 8017 - RNA, 20 nt, synthetic construct
  misc_feature 1..20: note = spacer sequence
  source 1..20: mol_type = other RNA
gtaggaagttgaccatgcag

SEQ ID NO: 8018 - RNA, 20 nt, synthetic construct
  misc_feature 1..20: note = spacer sequence
  source 1..20: mol_type = other RNA
aaaaagcaaatctgtaggaa

SEQ ID NO: 8019 - RNA, 20 nt, synthetic construct
  misc_feature 1..20: note = spacer sequence
  source 1..20: mol_type = other RNA
gttagcataataataattac

SEQ ID NO: 8020 - RNA, 20 nt, synthetic construct
  misc_feature 1..20: note = spacer sequence
  source 1..20: mol_type = other RNA
attatagtaacatacttaag

SEQ ID NO: 8021 - RNA, 20 nt, synthetic construct
  misc_feature 1..20: note = spacer sequence
  source 1..20: mol_type = other RNA
tagctattgcactttgtcaa

SEQ ID NO: 8022 - RNA, 20 nt, synthetic construct
  misc_feature 1..20: note = spacer sequence
  source 1..20: mol_type = other RNA
ctattagagtcaataaactt

SEQ ID NO: 8023 - RNA, 20 nt, synthetic construct
  misc_feature 1..20: note = spacer sequence
  source 1..20: mol_type = other RNA
aatagtgaaattttaactca

SEQ ID NO: 8024 - RNA, 20 nt, synthetic construct
  misc_feature 1..20: note = spacer sequence
  source 1..20: mol_type = other RNA
ataaacttgaaatctaaagt

SEQ ID NO: 8025 - RNA, 20 nt, synthetic construct
  misc_feature 1..20: note = spacer sequence
  source 1..20: mol_type = other RNA
agtttattgactctaatagt

SEQ ID NO: 8026 - RNA, 20 nt, synthetic construct
  misc_feature 1..20: note = spacer sequence
  source 1..20: mol_type = other RNA
aaagttaactttctatcact

SEQ ID NO: 8027 - RNA, 20 nt, synthetic construct
  misc_feature 1..20: note = spacer sequence
  source 1..20: mol_type = other RNA
atcactgaatgagattatct

SEQ ID NO: 8028 - RNA, 20 nt, synthetic construct
  misc_feature 1..20: note = spacer sequence
  source 1..20: mol_type = other RNA
ctgaatgagattatctgtag

SEQ ID NO: 8029 - RNA, 20 nt, synthetic construct
  misc_feature 1..20: note = spacer sequence
  source 1..20: mol_type = other RNA
gtgatagaaagttaacttta

SEQ ID NO: 8030 - RNA, 20 nt, synthetic construct
  misc_feature 1..20: note = spacer sequence
  source 1..20: mol_type = other RNA
ttcagtgatagaaagttaac

SEQ ID NO: 8031 - RNA, 20 nt, synthetic construct
  misc_feature 1..20: note = spacer sequence
  source 1..20: mol_type = other RNA
cattcagtgatagaaagtta

SEQ ID NO: 8032 - RNA, 20 nt, synthetic construct
  misc_feature 1..20: note = spacer sequence
  source 1..20: mol_type = other RNA
gtaggcaattttattttcaa

SEQ ID NO: 8033 - RNA, 20 nt, synthetic construct
  misc_feature 1..20: note = spacer sequence
  source 1..20: mol_type = other RNA
atattagccggaaaaaaatc

SEQ ID NO: 8034 - RNA, 20 nt, synthetic construct
  misc_feature 1..20: note = spacer sequence
  source 1..20: mol_type = other RNA
ggctaatattgaaaataaaa

SEQ ID NO: 8035 - RNA, 20 nt, synthetic construct
  misc_feature 1..20: note = spacer sequence
  source 1..20: mol_type = other RNA
tacctgaaattctttacagc

SEQ ID NO: 8036 - RNA, 20 nt, synthetic construct
  misc_feature 1..20: note = spacer sequence
  source 1..20: mol_type = other RNA
ggtaagatttttttccggct

SEQ ID NO: 8037 - RNA, 20 nt, synthetic construct
  misc_feature 1..20: note = spacer sequence
  source 1..20: mol_type = other RNA
ttacagcaattaactttgtc

SEQ ID NO: 8038 - RNA, 20 nt, synthetic construct
  misc_feature 1..20: note = spacer sequence
  source 1..20: mol_type = other RNA
accaaaatcaatctagagcc

SEQ ID NO: 8039 - RNA, 20 nt, synthetic construct
  misc_feature 1..20: note = spacer sequence
  source 1..20: mol_type = other RNA
atctagagcccagagttact

SEQ ID NO: 8040 - RNA, 20 nt, synthetic construct
  misc_feature 1..20: note = spacer sequence
  source 1..20: mol_type = other RNA
agagcccagagttactgccc

SEQ ID NO: 8041 - RNA, 20 nt, synthetic construct
  misc_feature 1..20: note = spacer sequence
  source 1..20: mol_type = other RNA
agattgattttggtagacaa

SEQ ID NO: 8042 - RNA, 20 nt, synthetic construct
  misc_feature 1..20: note = spacer sequence
  source 1..20: mol_type = other RNA
gggctctagattgattttgg

SEQ ID NO: 8043 - RNA, 20 nt, synthetic construct
  misc_feature 1..20: note = spacer sequence
  source 1..20: mol_type = other RNA
caccttcctcaagatgtccc

SEQ ID NO: 8044 - RNA, 20 nt, synthetic construct
  misc_feature 1..20: note = spacer sequence
  source 1..20: mol_type = other RNA
tcaagatgtccctcagagag

SEQ ID NO: 8045 - RNA, 20 nt, synthetic construct
  misc_feature 1..20: note = spacer sequence
  source 1..20: mol_type = other RNA
agatgtccctcagagagatt

SEQ ID NO: 8046 - RNA, 20 nt, synthetic construct
  misc_feature 1..20: note = spacer sequence
  source 1..20: mol_type = other RNA
tgaggaaggtgggaggggca

SEQ ID NO: 8047 - RNA, 20 nt, synthetic construct
  misc_feature 1..20: note = spacer sequence
  source 1..20: mol_type = other RNA
ctcagagagatttacattta

SEQ ID NO: 8048 - RNA, 20 nt, synthetic construct
  misc_feature 1..20: note = spacer sequence
  source 1..20: mol_type = other RNA
gagagatttacatttaagcc

SEQ ID NO: 8049 - RNA, 20 nt, synthetic construct
  misc_feature 1..20: note = spacer sequence
  source 1..20: mol_type = other RNA
gagggacatcttgaggaagg

SEQ ID NO: 8050 - RNA, 20 nt, synthetic construct
  misc_feature 1..20: note = spacer sequence
  source 1..20: mol_type = other RNA
ctgagggacatcttgaggaa

SEQ ID NO: 8051 - RNA, 20 nt, synthetic construct
  misc_feature 1..20: note = spacer sequence
  source 1..20: mol_type = other RNA
ctctgagggacatcttgagg

SEQ ID NO: 8052 - RNA, 20 nt, synthetic construct
  misc_feature 1..20: note = spacer sequence
  source 1..20: mol_type = other RNA
tcagacttgcactctggagc

SEQ ID NO: 8053 - RNA, 20 nt, synthetic construct
  misc_feature 1..20: note = spacer sequence
  source 1..20: mol_type = other RNA
gacttgcactctggagcagc

SEQ ID NO: 8054 - RNA, 20 nt, synthetic construct
  misc_feature 1..20: note = spacer sequence
  source 1..20: mol_type = other RNA
gaagaatggcttaaatgtaa

SEQ ID NO: 8055 - RNA, 20 nt, synthetic construct
  misc_feature 1..20: note = spacer sequence
  source 1..20: mol_type = other RNA
ggagcagcctaacaagtgac

SEQ ID NO: 8056 - RNA, 20 nt, synthetic construct
  misc_feature 1..20: note = spacer sequence
  source 1..20: mol_type = other RNA
agagtgcaagtctgaagaat

SEQ ID NO: 8057 - RNA, 20 nt, synthetic construct
  misc_feature 1..20: note = spacer sequence
  source 1..20: mol_type = other RNA
cttgttaggctgctccagag

SEQ ID NO: 8058 - RNA, 20 nt, synthetic construct
  misc_feature 1..20: note = spacer sequence
  source 1..20: mol_type = other RNA
tgggctgtcacttgttaggc

SEQ ID NO: 8059 - RNA, 20 nt, synthetic construct
  misc_feature 1..20: note = spacer sequence
  source 1..20: mol_type = other RNA
cctgggctgtcacttgttag

SEQ ID NO: 8060 - RNA, 20 nt, synthetic construct
  misc_feature 1..20: note = spacer sequence
  source 1..20: mol_type = other RNA
atttctcctgggctgtcact

SEQ ID NO: 8061 - RNA, 20 nt, synthetic construct
  misc_feature 1..20: note = spacer sequence
  source 1..20: mol_type = other RNA
ccatttctcctgggctgtca

SEQ ID NO: 8062 - RNA, 20 nt, synthetic construct
  misc_feature 1..20: note = spacer sequence
  source 1..20: mol_type = other RNA
aggttttctgcaagactttc

SEQ ID NO: 8063 - RNA, 20 nt, synthetic construct
  misc_feature 1..20: note = spacer sequence
  source 1..20: mol_type = other RNA
gcaagactttctccatgttt

SEQ ID NO: 8064 - RNA, 20 nt, synthetic construct
  misc_feature 1..20: note = spacer sequence
  source 1..20: mol_type = other RNA
tgcagaaaaccttgaaatgt

SEQ ID NO: 8065 - RNA, 20 nt, synthetic construct
  misc_feature 1..20: note = spacer sequence
  source 1..20: mol_type = other RNA
ccatgtttcatttgaagtgc

SEQ ID NO: 8066 - RNA, 20 nt, synthetic construct
  misc_feature 1..20: note = spacer sequence
  source 1..20: mol_type = other RNA
atgtttcatttgaagtgctt

SEQ ID NO: 8067 - RNA, 20 nt, synthetic construct
  misc_feature 1..20: note = spacer sequence
  source 1..20: mol_type = other RNA
tttgaagtgctttgccttgg

SEQ ID NO: 8068 - RNA, 20 nt, synthetic construct
  misc_feature 1..20: note = spacer sequence
  source 1..20: mol_type = other RNA
aatgaaacatggagaaagtc

SEQ ID NO: 8069 - RNA, 20 nt, synthetic construct
  misc_feature 1..20: note = spacer sequence
  source 1..20: mol_type = other RNA
caaggcaaagcacttcaaat

SEQ ID NO: 8070 - RNA, 20 nt, synthetic construct
  misc_feature 1..20: note = spacer sequence
  source 1..20: mol_type = other RNA
cccaaggcaaagcacttcaa

SEQ ID NO: 8071 - RNA, 20 nt, synthetic construct
  misc_feature 1..20: note = spacer sequence
  source 1..20: mol_type = other RNA
tgtgtaaattcatatccacg

SEQ ID NO: 8072 - RNA, 20 nt, synthetic construct
  misc_feature 1..20: note = spacer sequence
  source 1..20: mol_type = other RNA
tatccacgccaagtatttgt

SEQ ID NO: 8073 - RNA, 20 nt, synthetic construct
  misc_feature 1..20: note = spacer sequence
  source 1..20: mol_type = other RNA
acgccaagtatttgttctag

SEQ ID NO: 8074 - RNA, 20 nt, synthetic construct
  misc_feature 1..20: note = spacer sequence
  source 1..20: mol_type = other RNA
agattaatcactattttgca

SEQ ID NO: 8075 - RNA, 20 nt, synthetic construct
  misc_feature 1..20: note = spacer sequence
  source 1..20: mol_type = other RNA
agaacaaatacttggcgtgg

SEQ ID NO: 8076 - RNA, 20 nt, synthetic construct
  misc_feature 1..20: note = spacer sequence
  source 1..20: mol_type = other RNA
ctattttgcattatccactg

SEQ ID NO: 8077 - RNA, 20 nt, synthetic construct
  misc_feature 1..20: note = spacer sequence
  source 1..20: mol_type = other RNA
actgtatccaatgaacaagg

SEQ ID NO: 8078 - RNA, 20 nt, synthetic construct
  misc_feature 1..20: note = spacer sequence
  source 1..20: mol_type = other RNA
aatgaacaaggttatatact

SEQ ID NO: 8079 - RNA, 20 nt, synthetic construct
  misc_feature 1..20: note = spacer sequence
  source 1..20: mol_type = other RNA
ttggatacagtggataatgc

SEQ ID NO: 8080 - RNA, 20 nt, synthetic construct
  misc_feature 1..20: note = spacer sequence
  source 1..20: mol_type = other RNA
acttagtatataaccttgtt

SEQ ID NO: 8081 - RNA, 20 nt, synthetic construct
  misc_feature 1..20: note = spacer sequence
  source 1..20: mol_type = other RNA
tatttaagaaccatttctac

SEQ ID NO: 8082 - RNA, 20 nt, synthetic construct
  misc_feature 1..20: note = spacer sequence
  source 1..20: mol_type = other RNA
taaatacgaattacagtacc

SEQ ID NO: 8083 - RNA, 20 nt, synthetic construct
  misc_feature 1..20: note = spacer sequence
  source 1..20: mol_type = other RNA
actatataacactagtggaa

SEQ ID NO: 8084 - RNA, 20 nt, synthetic construct
  misc_feature 1..20: note = spacer sequence
  source 1..20: mol_type = other RNA
actagtgttatatagtagaa

SEQ ID NO: 8085 - RNA, 20 nt, synthetic construct
  misc_feature 1..20: note = spacer sequence
  source 1..20: mol_type = other RNA
aattattgtattaatgttat

SEQ ID NO: 8086 - RNA, 20 nt, synthetic construct
  misc_feature 1..20: note = spacer sequence
  source 1..20: mol_type = other RNA
aatattttaaagctttcaaa

SEQ ID NO: 8087 - RNA, 20 nt, synthetic construct
  misc_feature 1..20: note = spacer sequence
  source 1..20: mol_type = other RNA
aagaagaacacttttatagg

SEQ ID NO: 8088 - RNA, 20 nt, synthetic construct
  misc_feature 1..20: note = spacer sequence
  source 1..20: mol_type = other RNA
ttgaaagctttaaaatattt

SEQ ID NO: 8089 - RNA, 20 nt, synthetic construct
  misc_feature 1..20: note = spacer sequence
  source 1..20: mol_type = other RNA
tctttgaaagctttaaaata

SEQ ID NO: 8090 - RNA, 20 nt, synthetic construct
  misc_feature 1..20: note = spacer sequence
  source 1..20: mol_type = other RNA
tataaaagtgttcttctttg

SEQ ID NO: 8091 - RNA, 20 nt, synthetic construct
  misc_feature 1..20: note = spacer sequence
  source 1..20: mol_type = other RNA
ggtatttaatttggtaccca

SEQ ID NO: 8092 - RNA, 20 nt, synthetic construct
  misc_feature 1..20: note = spacer sequence
  source 1..20: mol_type = other RNA
ctctagcttataatttaatg

SEQ ID NO: 8093 - RNA, 20 nt, synthetic construct
  misc_feature 1..20: note = spacer sequence
  source 1..20: mol_type = other RNA
agcttataatttaatgtaac

SEQ ID NO: 8094 - RNA, 20 nt, synthetic construct
  misc_feature 1..20: note = spacer sequence
  source 1..20: mol_type = other RNA
aaattcaaacaaaattaaaa

SEQ ID NO: 8095 - RNA, 20 nt, synthetic construct
  misc_feature 1..20: note = spacer sequence
  source 1..20: mol_type = other RNA
aacaaaattaaaacacaaaa

SEQ ID NO: 8096 - RNA, 20 nt, synthetic construct
  misc_feature 1..20: note = spacer sequence
  source 1..20: mol_type = other RNA
aagtactaacataatacgta

SEQ ID NO: 8097 - RNA, 20 nt, synthetic construct
  misc_feature 1..20: note = spacer sequence
  source 1..20: mol_type = other RNA
actttctagaattttcttca

SEQ ID NO: 8098 - RNA, 20 nt, synthetic construct
  misc_feature 1..20: note = spacer sequence
  source 1..20: mol_type = other RNA
agaattttcttcaggcttcc

SEQ ID NO: 8099 - RNA, 20 nt, synthetic construct
  misc_feature 1..20: note = spacer sequence
  source 1..20: mol_type = other RNA
agaaagtagagttttcaaag

SEQ ID NO: 8100 - RNA, 20 nt, synthetic construct
  misc_feature 1..20: note = spacer sequence
  source 1..20: mol_type = other RNA
tcaggcttccttttaatgtc

SEQ ID NO: 8101 - RNA, 20 nt, synthetic construct
  misc_feature 1..20: note = spacer sequence
  source 1..20: mol_type = other RNA
ggcttccttttaatgtcagt

SEQ ID NO: 8102 - RNA, 20 nt, synthetic construct
  misc_feature 1..20: note = spacer sequence
  source 1..20: mol_type = other RNA
ttttaatgtcagtggctaac

SEQ ID NO: 8103 - RNA, 20 nt, synthetic construct
  misc_feature 1..20: note = spacer sequence
  source 1..20: mol_type = other RNA
gtggctaactagtgcattac

SEQ ID NO: 8104 - RNA, 20 nt, synthetic construct
  misc_feature 1..20: note = spacer sequence
  source 1..20: mol_type = other RNA
actagtaatgcactagttag

SEQ ID NO: 8105 - RNA, 20 nt, synthetic construct
  misc_feature 1..20: note = spacer sequence
  source 1..20: mol_type = other RNA
agtaagtgttgctaaaaatg

SEQ ID NO: 8106 - RNA, 20 nt, synthetic construct
  misc_feature 1..20: note = spacer sequence
  source 1..20: mol_type = other RNA
tttttagcaacacttactag

SEQ ID NO: 8107 - RNA, 20 nt, synthetic construct
  misc_feature 1..20: note = spacer sequence
  source 1..20: mol_type = other RNA
aaaattctagacagaaactg

SEQ ID NO: 8108 - RNA, 20 nt, synthetic construct
  misc_feature 1..20: note = spacer sequence
  source 1..20: mol_type = other RNA
agacagaaactgggcaaaga

SEQ ID NO: 8109 - RNA, 20 nt, synthetic construct
  misc_feature 1..20: note = spacer sequence
  source 1..20: mol_type = other RNA
agaattttagattttttagt

SEQ ID NO: 8110 - RNA, 20 nt, synthetic construct
  misc_feature 1..20: note = spacer sequence
  source 1..20: mol_type = other RNA
gtctagaattttagattttt

SEQ ID NO: 8111 - RNA, 20 nt, synthetic construct
  misc_feature 1..20: note = spacer sequence
  source 1..20: mol_type = other RNA
ttgcccagtttctgtctaga

SEQ ID NO: 8112 - RNA, 20 nt, synthetic construct
  misc_feature 1..20: note = spacer sequence
  source 1..20: mol_type = other RNA
aaacttaagtgaaatcatca

SEQ ID NO: 8113 - RNA, 20 nt, synthetic construct
  misc_feature 1..20: note = spacer sequence
  source 1..20: mol_type = other RNA
cttaagtttggatttctttg

SEQ ID NO: 8114 - RNA, 20 nt, synthetic construct
  misc_feature 1..20: note = spacer sequence
  source 1..20: mol_type = other RNA
tcaaaatcaaattcctattg

SEQ ID NO: 8115 - RNA, 20 nt, synthetic construct
  misc_feature 1..20: note = spacer sequence
  source 1..20: mol_type = other RNA
aaatcaaattcctattgata

SEQ ID NO: 8116 - RNA, 20 nt, synthetic construct
  misc_feature 1..20: note = spacer sequence
  source 1..20: mol_type = other RNA
aattcctattgatattgctg

SEQ ID NO: 8117 - RNA, 20 nt, synthetic construct
  misc_feature 1..20: note = spacer sequence
  source 1..20: mol_type = other RNA
tattgatattgctggcaaag

SEQ ID NO: 8118 - RNA, 20 nt, synthetic construct
  misc_feature 1..20: note = spacer sequence
  source 1..20: mol_type = other RNA
ataggaatttgattttgatg

SEQ ID NO: 8119 - RNA, 20 nt, synthetic construct
  misc_feature 1..20: note = spacer sequence
  source 1..20: mol_type = other RNA
tcttttaggcagtttcaggg

SEQ ID NO: 8120 - RNA, 20 nt, synthetic construct
  misc_feature 1..20: note = spacer sequence
  source 1..20: mol_type = other RNA
tttaggcagtttcagggatc

SEQ ID NO: 8121 - RNA, 20 nt, synthetic construct
  misc_feature 1..20: note = spacer sequence
  source 1..20: mol_type = other RNA
gggatcataacgatagcata

SEQ ID NO: 8122 - RNA, 20 nt, synthetic construct
  misc_feature 1..20: note = spacer sequence
  source 1..20: mol_type = other RNA
ctgaaactgcctaaaagatg

SEQ ID NO: 8123 - RNA, 20 nt, synthetic construct
  misc_feature 1..20: note = spacer sequence
  source 1..20: mol_type = other RNA
taacgatagcataaaaacat

SEQ ID NO: 8124 - RNA, 20 nt, synthetic construct
  misc_feature 1..20: note = spacer sequence
  source 1..20: mol_type = other RNA
ttatgatccctgaaactgcc

SEQ ID NO: 8125 - RNA, 20 nt, synthetic construct
  misc_feature 1..20: note = spacer sequence
  source 1..20: mol_type = other RNA
caaaccaattctgtccccac

SEQ ID NO: 8126 - RNA, 20 nt, synthetic construct
  misc_feature 1..20: note = spacer sequence
  source 1..20: mol_type = other RNA
gtccccacaatttcctgagg

SEQ ID NO: 8127 - RNA, 20 nt, synthetic construct
  misc_feature 1..20: note = spacer sequence
  source 1..20: mol_type = other RNA
ccacaatttcctgaggtgtc

SEQ ID NO: 8128 - RNA, 20 nt, synthetic construct
  misc_feature 1..20: note = spacer sequence
  source 1..20: mol_type = other RNA
tgaggtgtccaaatctggaa

SEQ ID NO: 8129 - RNA, 20 nt, synthetic construct
  misc_feature 1..20: note = spacer sequence
  source 1..20: mol_type = other RNA
ggaaattgtggggacagaat

SEQ ID NO: 8130 - RNA, 20 nt, synthetic construct
  misc_feature 1..20: note = spacer sequence
  source 1..20: mol_type = other RNA
aaatctggaatcatcaactc

SEQ ID NO: 8131 - RNA, 20 nt, synthetic construct
  misc_feature 1..20: note = spacer sequence
  source 1..20: mol_type = other RNA
ggaatcatcaactcaaatgt

SEQ ID NO: 8132 - RNA, 20 nt, synthetic construct
  misc_feature 1..20: note = spacer sequence
  source 1..20: mol_type = other RNA
agatttggacacctcaggaa

SEQ ID NO: 8133 - RNA, 20 nt, synthetic construct
  misc_feature 1..20: note = spacer sequence
  source 1..20: mol_type = other RNA
tcaactcaaatgtctactga

SEQ ID NO: 8134 - RNA, 20 nt, synthetic construct
  misc_feature 1..20: note = spacer sequence
  source 1..20: mol_type = other RNA
actcaaatgtctactgaagc

SEQ ID NO: 8135 - RNA, 20 nt, synthetic construct
  misc_feature 1..20: note = spacer sequence
  source 1..20: mol_type = other RNA
aatgtctactgaagccatgc

SEQ ID NO: 8136 - RNA, 20 nt, synthetic construct
  misc_feature 1..20: note = spacer sequence
  source 1..20: mol_type = other RNA
actgaagccatgccaggact

SEQ ID NO: 8137 - RNA, 20 nt, synthetic construct
  misc_feature 1..20: note = spacer sequence
  source 1..20: mol_type = other RNA
gtagacatttgagttgatga

SEQ ID NO: 8138 - RNA, 20 nt, synthetic construct
  misc_feature 1..20: note = spacer sequence
  source 1..20: mol_type = other RNA
tggcatggcttcagtagaca

SEQ ID NO: 8139 - RNA, 20 nt, synthetic construct
  misc_feature 1..20: note = spacer sequence
  source 1..20: mol_type = other RNA
tgctttaaaacctttggtaa

SEQ ID NO: 8140 - RNA, 20 nt, synthetic construct
  misc_feature 1..20: note = spacer sequence
  source 1..20: mol_type = other RNA
tacttgtaatttttgttacc

SEQ ID NO: 8141 - RNA, 20 nt, synthetic construct
  misc_feature 1..20: note = spacer sequence
  source 1..20: mol_type = other RNA
cttcctacttgtaatttttg

SEQ ID NO: 8142 - RNA, 20 nt, synthetic construct
  misc_feature 1..20: note = spacer sequence
  source 1..20: mol_type = other RNA
tacaaatactcaactcttat

SEQ ID NO: 8143 - RNA, 20 nt, synthetic construct
  misc_feature 1..20: note = spacer sequence
  source 1..20: mol_type = other RNA
actcttatttataaatttta

SEQ ID NO: 8144 - RNA, 20 nt, synthetic construct
  misc_feature 1..20: note = spacer sequence
  source 1..20: mol_type = other RNA
tatttataaattttaccatc

SEQ ID NO: 8145 - RNA, 20 nt, synthetic construct
  misc_feature 1..20: note = spacer sequence
  source 1..20: mol_type = other RNA
gctacagtagtgtgacaaaa

SEQ ID NO: 8146 - RNA, 20 nt, synthetic construct
  misc_feature 1..20: note = spacer sequence
  source 1..20: mol_type = other RNA
cactactgtagctgatggta

SEQ ID NO: 8147 - RNA, 20 nt, synthetic construct
  misc_feature 1..20: note = spacer sequence
  source 1..20: mol_type = other RNA
cttcatattgataattaatg

SEQ ID NO: 8148 - RNA, 20 nt, synthetic construct
  misc_feature 1..20: note = spacer sequence
  source 1..20: mol_type = other RNA
tcatattgataattaatgaa

SEQ ID NO: 8149 - RNA, 20 nt, synthetic construct
  misc_feature 1..20: note = spacer sequence
  source 1..20: mol_type = other RNA
tattgataattaatgaataa

SEQ ID NO: 8150 - RNA, 20 nt, synthetic construct
  misc_feature 1..20: note = spacer sequence
  source 1..20: mol_type = other RNA
atatgaagagattaccacca

SEQ ID NO: 8151 - RNA, 20 nt, synthetic construct
  misc_feature 1..20: note = spacer sequence
  source 1..20: mol_type = other RNA
ttaattatcaatatgaagag

SEQ ID NO: 8152 - RNA, 20 nt, synthetic construct
  misc_feature 1..20: note = spacer sequence
  source 1..20: mol_type = other RNA
agaggctttaattttccata

SEQ ID NO: 8153 - RNA, 20 nt, synthetic construct
  misc_feature 1..20: note = spacer sequence
  source 1..20: mol_type = other RNA
tgacaagtatgtttattcat

SEQ ID NO: 8154 - RNA, 20 nt, synthetic construct
  misc_feature 1..20: note = spacer sequence
  source 1..20: mol_type = other RNA
ataaaaggaatgagttcgac

SEQ ID NO: 8155 - RNA, 20 nt, synthetic construct
  misc_feature 1..20: note = spacer sequence
  source 1..20: mol_type = other RNA
ttttatggaaaattaaagcc

SEQ ID NO: 8156 - RNA, 20 nt, synthetic construct
  misc_feature 1..20: note = spacer sequence
  source 1..20: mol_type = other RNA
ttccttttatggaaaattaa

SEQ ID NO: 8157 - RNA, 20 nt, synthetic construct
  misc_feature 1..20: note = spacer sequence
  source 1..20: mol_type = other RNA
acctagaacagtttttgctt

SEQ ID NO: 8158 - RNA, 20 nt, synthetic construct
  misc_feature 1..20: note = spacer sequence
  source 1..20: mol_type = other RNA
aactcattccttttatggaa

SEQ ID NO: 8159 - RNA, 20 nt, synthetic construct
  misc_feature 1..20: note = spacer sequence
  source 1..20: mol_type = other RNA
aggtcgaactcattcctttt

SEQ ID NO: 8160 - RNA, 20 nt, synthetic construct
  misc_feature 1..20: note = spacer sequence
  source 1..20: mol_type = other RNA
agcaaaaactgttctaggtc

SEQ ID NO: 8161 - RNA, 20 nt, synthetic construct
  misc_feature 1..20: note = spacer sequence
  source 1..20: mol_type = other RNA
tttcaagcaaaaactgttct

SEQ ID NO: 8162 - RNA, 20 nt, synthetic construct
  misc_feature 1..20: note = spacer sequence
  source 1..20: mol_type = other RNA
aaaatatcttttcaagcaaa

SEQ ID NO: 8163 - RNA, 20 nt, synthetic construct
  misc_feature 1..20: note = spacer sequence
  source 1..20: mol_type = other RNA
gtactgtgttaccagtatat

SEQ ID NO: 8164 - RNA, 20 nt, synthetic construct
  misc_feature 1..20: note = spacer sequence
  source 1..20: mol_type = other RNA
tttttattgtttggaacacc

SEQ ID NO: 8165 - RNA, 20 nt, synthetic construct
  misc_feature 1..20: note = spacer sequence
  source 1..20: mol_type = other RNA
aaacaataaaaaagaataca

SEQ ID NO: 8166 - RNA, 20 nt, synthetic construct
  misc_feature 1..20: note = spacer sequence
  source 1..20: mol_type = other RNA
ttgtaaatgtaaagtttggg

SEQ ID NO: 8167 - RNA, 20 nt, synthetic construct
  misc_feature 1..20: note = spacer sequence
  source 1..20: mol_type = other RNA
aatatgtacaacctattttt

SEQ ID NO: 8168 - RNA, 20 nt, synthetic construct
  misc_feature 1..20: note = spacer sequence
  source 1..20: mol_type = other RNA
ctaatatgtacaacctattt

SEQ ID NO: 8169 - RNA, 20 nt, synthetic construct
  misc_feature 1..20: note = spacer sequence
  source 1..20: mol_type = other RNA
aaaacttttgtataacatgt

SEQ ID NO: 8170 - RNA, 20 nt, synthetic construct
  misc_feature 1..20: note = spacer sequence
  source 1..20: mol_type = other RNA
ttactgtataagtgtttgtg

SEQ ID NO: 8171 - RNA, 20 nt, synthetic construct
  misc_feature 1..20: note = spacer sequence
  source 1..20: mol_type = other RNA
ctttactgtataagtgtttg

SEQ ID NO: 8172 - RNA, 20 nt, synthetic construct
  misc_feature 1..20: note = spacer sequence
  source 1..20: mol_type = other RNA
ttctctttactgtataagtg

SEQ ID NO: 8173 - RNA, 20 nt, synthetic construct
  misc_feature 1..20: note = spacer sequence
  source 1..20: mol_type = other RNA
gttcattctctttactgtat

SEQ ID NO: 8174 - RNA, 20 nt, synthetic construct
  misc_feature 1..20: note = spacer sequence
  source 1..20: mol_type = other RNA
tttgtaatattccttctctc

SEQ ID NO: 8175 - RNA, 20 nt, synthetic construct
  misc_feature 1..20: note = spacer sequence
  source 1..20: mol_type = other RNA
ttctctcctaagtgaccaac

SEQ ID NO: 8176 - RNA, 20 nt, synthetic construct
  misc_feature 1..20: note = spacer sequence
  source 1..20: mol_type = other RNA
ctcctaagtgaccaacaact

SEQ ID NO: 8177 - RNA, 20 nt, synthetic construct
  misc_feature 1..20: note = spacer sequence
  source 1..20: mol_type = other RNA
cctaagtgaccaacaactgt

SEQ ID NO: 8178 - RNA, 20 nt, synthetic construct
  misc_feature 1..20: note = spacer sequence
  source 1..20: mol_type = other RNA
taagtgaccaacaactgtag

SEQ ID NO: 8179 - RNA, 20 nt, synthetic construct
  misc_feature 1..20: note = spacer sequence
  source 1..20: mol_type = other RNA
cttaggagagaaggaatatt

SEQ ID NO: 8180 - RNA, 20 nt, synthetic construct
  misc_feature 1..20: note = spacer sequence
  source 1..20: mol_type = other RNA
acagttgttggtcacttagg

SEQ ID NO: 8181 - RNA, 20 nt, synthetic construct
  misc_feature 1..20: note = spacer sequence
  source 1..20: mol_type = other RNA
taaaagctaaaggtaacatt

SEQ ID NO: 8182 - RNA, 20 nt, synthetic construct
  misc_feature 1..20: note = spacer sequence
  source 1..20: mol_type = other RNA
cacacccaaatagctacagt

SEQ ID NO: 8183 - RNA, 20 nt, synthetic construct
  misc_feature 1..20: note = spacer sequence
  source 1..20: mol_type = other RNA
cacacacccaaatagctaca

SEQ ID NO: 8184 - RNA, 20 nt, synthetic construct
  misc_feature 1..20: note = spacer sequence
  source 1..20: mol_type = other RNA
ttaaaatcaagtaataatta

SEQ ID NO: 8185 - RNA, 20 nt, synthetic construct
  misc_feature 1..20: note = spacer sequence
  source 1..20: mol_type = other RNA
agtaataattattgcgcatc

SEQ ID NO: 8186 - RNA, 20 nt, synthetic construct
  misc_feature 1..20: note = spacer sequence
  source 1..20: mol_type = other RNA
agtaattttatattttcaga

SEQ ID NO: 8187 - RNA, 20 nt, synthetic construct
  misc_feature 1..20: note = spacer sequence
  source 1..20: mol_type = other RNA
gattatcagtattactaaaa

SEQ ID NO: 8188 - RNA, 20 nt, synthetic construct
  misc_feature 1..20: note = spacer sequence
  source 1..20: mol_type = other RNA
gaaaatataaaattacttga

SEQ ID NO: 8189 - RNA, 20 nt, synthetic construct
  misc_feature 1..20: note = spacer sequence
  source 1..20: mol_type = other RNA
gtattactaaaagaatcaaa

SEQ ID NO: 8190 - RNA, 20 nt, synthetic construct
  misc_feature 1..20: note = spacer sequence
  source 1..20: mol_type = other RNA
tttagtaatactgataatct

SEQ ID NO: 8191 - RNA, 20 nt, synthetic construct
  misc_feature 1..20: note = spacer sequence
  source 1..20: mol_type = other RNA
aaatctctaaaagttggttt

SEQ ID NO: 8192 - RNA, 20 nt, synthetic construct
  misc_feature 1..20: note = spacer sequence
  source 1..20: mol_type = other RNA
ctaaaagttggttttattcc

SEQ ID NO: 8193 - RNA, 20 nt, synthetic construct
  misc_feature 1..20: note = spacer sequence
  source 1..20: mol_type = other RNA
aaaagttggttttattccct

SEQ ID NO: 8194 - RNA, 20 nt, synthetic construct
  misc_feature 1..20: note = spacer sequence
  source 1..20: mol_type = other RNA
ctccaaattcagtagtacaa

SEQ ID NO: 8195 - RNA, 20 nt, synthetic construct
  misc_feature 1..20: note = spacer sequence
  source 1..20: mol_type = other RNA
aaattcagtagtacaactca

SEQ ID NO: 8196 - RNA, 20 nt, synthetic construct
  misc_feature 1..20: note = spacer sequence
  source 1..20: mol_type = other RNA
gtagtacaactcaactaatt

SEQ ID NO: 8197 - RNA, 20 nt, synthetic construct
  misc_feature 1..20: note = spacer sequence
  source 1..20: mol_type = other RNA
actaattactcccaaactaa

SEQ ID NO: 8198 - RNA, 20 nt, synthetic construct
  misc_feature 1..20: note = spacer sequence
  source 1..20: mol_type = other RNA
caaactaacacccgcactta

SEQ ID NO: 8199 - RNA, 20 nt, synthetic construct
  misc_feature 1..20: note = spacer sequence
  source 1..20: mol_type = other RNA
gatgatacaaccaaaccatc

SEQ ID NO: 8200 - RNA, 20 nt, synthetic construct
  misc_feature 1..20: note = spacer sequence
  source 1..20: mol_type = other RNA
gacttaagtgcgggtgttag

SEQ ID NO: 8201 - RNA, 20 nt, synthetic construct
  misc_feature 1..20: note = spacer sequence
  source 1..20: mol_type = other RNA
tcagacttaagtgcgggtgt

SEQ ID NO: 8202 - RNA, 20 nt, synthetic construct
  misc_feature 1..20: note = spacer sequence
  source 1..20: mol_type = other RNA
ttaaggcacccactgcctct

SEQ ID NO: 8203 - RNA, 20 nt, synthetic construct
  misc_feature 1..20: note = spacer sequence
  source 1..20: mol_type = other RNA
ttccagtataatcaggcttc

SEQ ID NO: 8204 - RNA, 20 nt, synthetic construct
  misc_feature 1..20: note = spacer sequence
  source 1..20: mol_type = other RNA
agtataatcaggcttcacta

SEQ ID NO: 8205 - RNA, 20 nt, synthetic construct
  misc_feature 1..20: note = spacer sequence
  source 1..20: mol_type = other RNA
ggcttcactacagaattttt

SEQ ID NO: 8206 - RNA, 20 nt, synthetic construct
  misc_feature 1..20: note = spacer sequence
  source 1..20: mol_type = other RNA
ctacagaatttttggagacc

SEQ ID NO: 8207 - RNA, 20 nt, synthetic construct
  misc_feature 1..20: note = spacer sequence
  source 1..20: mol_type = other RNA
gtagtgaagcctgattatac

SEQ ID NO: 8208 - RNA, 20 nt, synthetic construct
  misc_feature 1..20: note = spacer sequence
  source 1..20: mol_type = other RNA
aaaaattctgtagtgaagcc

SEQ ID NO: 8209 - RNA, 20 nt, synthetic construct
  misc_feature 1..20: note = spacer sequence
  source 1..20: mol_type = other RNA
ccaaaaattctgtagtgaag

SEQ ID NO: 8210 - RNA, 20 nt, synthetic construct
  misc_feature 1..20: note = spacer sequence
  source 1..20: mol_type = other RNA
gtgggtctccaaaaattctg

SEQ ID NO: 8211 - RNA, 20 nt, synthetic construct
  misc_feature 1..20: note = spacer sequence
  source 1..20: mol_type = other RNA
caaattaagatccaagaact

SEQ ID NO: 8212 - RNA, 20 nt, synthetic construct
  misc_feature 1..20: note = spacer sequence
  source 1..20: mol_type = other RNA
taatttgtgaaatgtggcaa

SEQ ID NO: 8213 - RNA, 20 nt, synthetic construct
  misc_feature 1..20: note = spacer sequence
  source 1..20: mol_type = other RNA
aagaactcagttaagtctcg

SEQ ID NO: 8214 - RNA, 20 nt, synthetic construct
  misc_feature 1..20: note = spacer sequence
  source 1..20: mol_type = other RNA
tggatcttaatttgtgaaat

SEQ ID NO: 8215 - RNA, 20 nt, synthetic construct
  misc_feature 1..20: note = spacer sequence
  source 1..20: mol_type = other RNA
gttaagtctcgctcactgga

SEQ ID NO: 8216 - RNA, 20 nt, synthetic construct
  misc_feature 1..20: note = spacer sequence
  source 1..20: mol_type = other RNA
cgctcactggaaaaactaca

SEQ ID NO: 8217 - RNA, 20 nt, synthetic construct
  misc_feature 1..20: note = spacer sequence
  source 1..20: mol_type = other RNA
ctcactggaaaaactacaga

SEQ ID NO: 8218 - RNA, 20 nt, synthetic construct
  misc_feature 1..20: note = spacer sequence
  source 1..20: mol_type = other RNA
ctggaaaaactacagatatc

SEQ ID NO: 8219 - RNA, 20 nt, synthetic construct
  misc_feature 1..20: note = spacer sequence
  source 1..20: mol_type = other RNA
agtgagcgagacttaactga

SEQ ID NO: 8220 - RNA, 20 nt, synthetic construct
  misc_feature 1..20: note = spacer sequence
  source 1..20: mol_type = other RNA
gtagtttttccagtgagcga

SEQ ID NO: 8221 - RNA, 20 nt, synthetic construct
  misc_feature 1..20: note = spacer sequence
  source 1..20: mol_type = other RNA
agtaggtgtgctatttatca

SEQ ID NO: 8222 - RNA, 20 nt, synthetic construct
  misc_feature 1..20: note = spacer sequence
  source 1..20: mol_type = other RNA
ctaaactgacacattttctc

SEQ ID NO: 8223 - RNA, 20 nt, synthetic construct
  misc_feature 1..20: note = spacer sequence
  source 1..20: mol_type = other RNA
gtttagtgataaatagcaca

SEQ ID NO: 8224 - RNA, 20 nt, synthetic construct
  misc_feature 1..20: note = spacer sequence
  source 1..20: mol_type = other RNA
cattaagccaactgatggaa

SEQ ID NO: 8225 - RNA, 20 nt, synthetic construct
  misc_feature 1..20: note = spacer sequence
  source 1..20: mol_type = other RNA
ttaagccaactgatggaact

SEQ ID NO: 8226 - RNA, 20 nt, synthetic construct
  misc_feature 1..20: note = spacer sequence
  source 1..20: mol_type = other RNA
gttggcttaatgagaaaatg

SEQ ID NO: 8227 - RNA, 20 nt, synthetic construct
  misc_feature 1..20: note = spacer sequence
  source 1..20: mol_type = other RNA
atcagttggcttaatgagaa

SEQ ID NO: 8228 - RNA, 20 nt, synthetic construct
  misc_feature 1..20: note = spacer sequence
  source 1..20: mol_type = other RNA
taaatttacacatattaaag

SEQ ID NO: 8229 - RNA, 20 nt, synthetic construct
  misc_feature 1..20: note = spacer sequence
  source 1..20: mol_type = other RNA
aatctatctcgaaaatatct

SEQ ID NO: 8230 - RNA, 20 nt, synthetic construct
  misc_feature 1..20: note = spacer sequence
  source 1..20: mol_type = other RNA
atctcgaaaatatctgaggc

SEQ ID NO: 8231 - RNA, 20 nt, synthetic construct
  misc_feature 1..20: note = spacer sequence
  source 1..20: mol_type = other RNA
cgaaaatatctgaggcaact

SEQ ID NO: 8232 - RNA, 20 nt, synthetic construct
  misc_feature 1..20: note = spacer sequence
  source 1..20: mol_type = other RNA
aaaatatctgaggcaactat

SEQ ID NO: 8233 - RNA, 20 nt, synthetic construct
  misc_feature 1..20: note = spacer sequence
  source 1..20: mol_type = other RNA
agatagattagatcataaat

SEQ ID NO: 8234 - RNA, 20 nt, synthetic construct
  misc_feature 1..20: note = spacer sequence
  source 1..20: mol_type = other RNA
gaggcaactatgtcaagata

SEQ ID NO: 8235 - RNA, 20 nt, synthetic construct
  misc_feature 1..20: note = spacer sequence
  source 1..20: mol_type = other RNA
gatattttcgagatagatta

SEQ ID NO: 8236 - RNA, 20 nt, synthetic construct
  misc_feature 1..20: note = spacer sequence
  source 1..20: mol_type = other RNA
agataaattttttcctaaaa

SEQ ID NO: 8237 - RNA, 20 nt, synthetic construct
  misc_feature 1..20: note = spacer sequence
  source 1..20: mol_type = other RNA
tgacatagttgcctcagata

SEQ ID NO: 8238 - RNA, 20 nt, synthetic construct
  misc_feature 1..20: note = spacer sequence
  source 1..20: mol_type = other RNA
taaaaagtaggccaggtgcg

SEQ ID NO: 8239 - RNA, 20 nt, synthetic construct
  misc_feature 1..20: note = spacer sequence
  source 1..20: mol_type = other RNA
cgaggtcaagagatcaagac

SEQ ID NO: 8240 - RNA, 20 nt, synthetic construct
  misc_feature 1..20: note = spacer sequence
  source 1..20: mol_type = other RNA
tgagccaccgcacctggcct

SEQ ID NO: 8241 - RNA, 20 nt, synthetic construct
  misc_feature 1..20: note = spacer sequence
  source 1..20: mol_type = other RNA
agagatcaagaccatcctgg

SEQ ID NO: 8242 - RNA, 20 nt, synthetic construct
  misc_feature 1..20: note = spacer sequence
  source 1..20: mol_type = other RNA
tgacctcgtgagccaccgca

SEQ ID NO: 8243 - RNA, 20 nt, synthetic construct
  misc_feature 1..20: note = spacer sequence
  source 1..20: mol_type = other RNA
cttgacctcgtgagccaccg

SEQ ID NO: 8244 - RNA, 20 nt, synthetic construct
  misc_feature 1..20: note = spacer sequence
  source 1..20: mol_type = other RNA
agaccatcctggccaacatg

SEQ ID NO: 8245 - RNA, 20 nt, synthetic construct
  misc_feature 1..20: note = spacer sequence
  source 1..20: mol_type = other RNA
tgatctcttgacctcgtgag

SEQ ID NO: 8246 - RNA, 20 nt, synthetic construct
  misc_feature 1..20: note = spacer sequence
  source 1..20: mol_type = other RNA
tggccaacatggtgaaaccc

SEQ ID NO: 8247 - RNA, 20 nt, synthetic construct
  misc_feature 1..20: note = spacer sequence
  source 1..20: mol_type = other RNA
ccatgttggccaggatggtc

SEQ ID NO: 8248 - RNA, 20 nt, synthetic construct
  misc_feature 1..20: note = spacer sequence
  source 1..20: mol_type = other RNA
ctactaaaaatagaaaaatc

SEQ ID NO: 8249 - RNA, 20 nt, synthetic construct
  misc_feature 1..20: note = spacer sequence
  source 1..20: mol_type = other RNA
actaaaaatagaaaaatcag

SEQ ID NO: 8250 - RNA, 20 nt, synthetic construct
  misc_feature 1..20: note = spacer sequence
  source 1..20: mol_type = other RNA
atttttagtagagacagggt

SEQ ID NO: 8251 - RNA, 20 nt, synthetic construct
  misc_feature 1..20: note = spacer sequence
  source 1..20: mol_type = other RNA
gctgggcgtggtggcacgcg

SEQ ID NO: 8252 - RNA, 20 nt, synthetic construct
  misc_feature 1..20: note = spacer sequence
  source 1..20: mol_type = other RNA
cagctacttggaaggctgag

SEQ ID NO: 8253 - RNA, 20 nt, synthetic construct
  misc_feature 1..20: note = spacer sequence
  source 1..20: mol_type = other RNA
aagtagctgggactacaggc

SEQ ID NO: 8254 - RNA, 20 nt, synthetic construct
  misc_feature 1..20: note = spacer sequence
  source 1..20: mol_type = other RNA
gccttccaagtagctgggac

SEQ ID NO: 8255 - RNA, 20 nt, synthetic construct
  misc_feature 1..20: note = spacer sequence
  source 1..20: mol_type = other RNA
tgcctcagccttccaagtag

SEQ ID NO: 8256 - RNA, 20 nt, synthetic construct
  misc_feature 1..20: note = spacer sequence
  source 1..20: mol_type = other RNA
cgtgcctcagccttccaagt

SEQ ID NO: 8257 - RNA, 20 nt, synthetic construct
  misc_feature 1..20: note = spacer sequence
  source 1..20: mol_type = other RNA
cttgaacttgggaggcggag

SEQ ID NO: 8258 - RNA, 20 nt, synthetic construct
  misc_feature 1..20: note = spacer sequence
  source 1..20: mol_type = other RNA
agcgattctcgtgcctcagc

SEQ ID NO: 8259 - RNA, 20 nt, synthetic construct
  misc_feature 1..20: note = spacer sequence
  source 1..20: mol_type = other RNA
caagttcaagcgattctcgt

SEQ ID NO: 8260 - RNA, 20 nt, synthetic construct
  misc_feature 1..20: note = spacer sequence
  source 1..20: mol_type = other RNA
gcctcccaagttcaagcgat

SEQ ID NO: 8261 - RNA, 20 nt, synthetic construct
  misc_feature 1..20: note = spacer sequence
  source 1..20: mol_type = other RNA
ctgcagcctccgcctcccaa

SEQ ID NO: 8262 - RNA, 20 nt, synthetic construct
  misc_feature 1..20: note = spacer sequence
  source 1..20: mol_type = other RNA
cactgcagcctccgcctccc

SEQ ID NO: 8263 - RNA, 20 nt, synthetic construct
  misc_feature 1..20: note = spacer sequence
  source 1..20: mol_type = other RNA
tctcactgcagcctccgcct

SEQ ID NO: 8264 - RNA, 20 nt, synthetic construct
  misc_feature 1..20: note = spacer sequence
  source 1..20: mol_type = other RNA
catctcactgcagcctccgc

SEQ ID NO: 8265 - RNA, 20 nt, synthetic construct
  misc_feature 1..20: note = spacer sequence
  source 1..20: mol_type = other RNA
aacctggcgacagagtgaga

SEQ ID NO: 8266 - RNA, 20 nt, synthetic construct
  misc_feature 1..20: note = spacer sequence
  source 1..20: mol_type = other RNA
ccaggttggagtgcagtggc

SEQ ID NO: 8267 - RNA, 20 nt, synthetic construct
  misc_feature 1..20: note = spacer sequence
  source 1..20: mol_type = other RNA
gtcgccaggttggagtgcag

SEQ ID NO: 8268 - RNA, 20 nt, synthetic construct
  misc_feature 1..20: note = spacer sequence
  source 1..20: mol_type = other RNA
ctctgtcgccaggttggagt

SEQ ID NO: 8269 - RNA, 20 nt, synthetic construct
  misc_feature 1..20: note = spacer sequence
  source 1..20: mol_type = other RNA
cactctgtcgccaggttgga

SEQ ID NO: 8270 - RNA, 20 nt, synthetic construct
  misc_feature 1..20: note = spacer sequence
  source 1..20: mol_type = other RNA
caaaaaaaaaaaaaagtttg

SEQ ID NO: 8271 - RNA, 20 nt, synthetic construct
  misc_feature 1..20: note = spacer sequence
  source 1..20: mol_type = other RNA
aaaaaaaaaaaaagtttgct

SEQ ID NO: 8272 - RNA, 20 nt, synthetic construct
  misc_feature 1..20: note = spacer sequence
  source 1..20: mol_type = other RNA
tctgtctgccaatataacag

SEQ ID NO: 8273 - RNA, 20 nt, synthetic construct
  misc_feature 1..20: note = spacer sequence
  source 1..20: mol_type = other RNA
gtctgccaatataacagttt

SEQ ID NO: 8274 - RNA, 20 nt, synthetic construct
  misc_feature 1..20: note = spacer sequence
  source 1..20: mol_type = other RNA
gccaatataacagtttaaaa

SEQ ID NO: 8275 - RNA, 20 nt, synthetic construct
  misc_feature 1..20: note = spacer sequence
  source 1..20: mol_type = other RNA
ttttaaactgttatattggc

SEQ ID NO: 8276 - RNA, 20 nt, synthetic construct
  misc_feature 1..20: note = spacer sequence
  source 1..20: mol_type = other RNA
cagatgaagtaatgtaattt

SEQ ID NO: 8277 - RNA, 20 nt, synthetic construct
  misc_feature 1..20: note = spacer sequence
  source 1..20: mol_type = other RNA
gtgattcgttttaaactgtt

SEQ ID NO: 8278 - RNA, 20 nt, synthetic construct
  misc_feature 1..20: note = spacer sequence
  source 1..20: mol_type = other RNA
tctgtgattcgttttaaact

SEQ ID NO: 8279 - RNA, 20 nt, synthetic construct
  misc_feature 1..20: note = spacer sequence
  source 1..20: mol_type = other RNA
aaaattacattacttcatct

SEQ ID NO: 8280 - RNA, 20 nt, synthetic construct
  misc_feature 1..20: note = spacer sequence
  source 1..20: mol_type = other RNA
tttgcaattctaaaattaca

SEQ ID NO: 8281 - RNA, 20 nt, synthetic construct
  misc_feature 1..20: note = spacer sequence
  source 1..20: mol_type = other RNA
tctctaggtcttataaataa

SEQ ID NO: 8282 - RNA, 20 nt, synthetic construct
  misc_feature 1..20: note = spacer sequence
  source 1..20: mol_type = other RNA
ctaggtcttataaataacat

SEQ ID NO: 8283 - RNA, 20 nt, synthetic construct
  misc_feature 1..20: note = spacer sequence
  source 1..20: mol_type = other RNA
aggtcttataaataacatct

SEQ ID NO: 8284 - RNA, 20 nt, synthetic construct
  misc_feature 1..20: note = spacer sequence
  source 1..20: mol_type = other RNA
tataaataacatctatgaca

SEQ ID NO: 8285 - RNA, 20 nt, synthetic construct
  misc_feature 1..20: note = spacer sequence
  source 1..20: mol_type = other RNA
atgacatttcttacctgtaa

SEQ ID NO: 8286 - RNA, 20 nt, synthetic construct
  misc_feature 1..20: note = spacer sequence
  source 1..20: mol_type = other RNA
tagatgttatttataagacc

SEQ ID NO: 8287 - RNA, 20 nt, synthetic construct
  misc_feature 1..20: note = spacer sequence
  source 1..20: mol_type = other RNA
tacctgtaatataagcaccc

SEQ ID NO: 8288 - RNA, 20 nt, synthetic construct
  misc_feature 1..20: note = spacer sequence
  source 1..20: mol_type = other RNA
ctaagtgcctgccctacagc

SEQ ID NO: 8289 - RNA, 20 nt, synthetic construct
  misc_feature 1..20: note = spacer sequence
  source 1..20: mol_type = other RNA
ataaaacacttgctttgggg

SEQ ID NO: 8290 - RNA, 20 nt, synthetic construct
  misc_feature 1..20: note = spacer sequence
  source 1..20: mol_type = other RNA
tcgtgacaccattgtgtttg

SEQ ID NO: 8291 - RNA, 20 nt, synthetic construct
  misc_feature 1..20: note = spacer sequence
  source 1..20: mol_type = other RNA
tgacaccattgtgtttgtca

SEQ ID NO: 8292 - RNA, 20 nt, synthetic construct
  misc_feature 1..20: note = spacer sequence
  source 1..20: mol_type = other RNA
cgatgatttaatgggctaac

SEQ ID NO: 8293 - RNA, 20 nt, synthetic construct
  misc_feature 1..20: note = spacer sequence
  source 1..20: mol_type = other RNA
tttttctccccctttagaga

SEQ ID NO: 8294 - RNA, 20 nt, synthetic construct
  misc_feature 1..20: note = spacer sequence
  source 1..20: mol_type = other RNA
ccccctttagagatgagaaa

SEQ ID NO: 8295 - RNA, 20 nt, synthetic construct
  misc_feature 1..20: note = spacer sequence
  source 1..20: mol_type = other RNA
ccctttagagatgagaaaac

SEQ ID NO: 8296 - RNA, 20 nt, synthetic construct
  misc_feature 1..20: note = spacer sequence
  source 1..20: mol_type = other RNA
aaagggggagaaaaatgaca

SEQ ID NO: 8297 - RNA, 20 nt, synthetic construct
  misc_feature 1..20: note = spacer sequence
  source 1..20: mol_type = other RNA
ctaaagggggagaaaaatga

SEQ ID NO: 8298 - RNA, 20 nt, synthetic construct
  misc_feature 1..20: note = spacer sequence
  source 1..20: mol_type = other RNA
tctctaaagggggagaaaaa

SEQ ID NO: 8299 - RNA, 20 nt, synthetic construct
  misc_feature 1..20: note = spacer sequence
  source 1..20: mol_type = other RNA
catctctaaagggggagaaa

SEQ ID NO: 8300 - RNA, 20 nt, synthetic construct
  misc_feature 1..20: note = spacer sequence
  source 1..20: mol_type = other RNA
gttttctcatctctaaaggg

SEQ ID NO: 8301 - RNA, 20 nt, synthetic construct
  misc_feature 1..20: note = spacer sequence
  source 1..20: mol_type = other RNA
acttctagacttatagtttt

SEQ ID NO: 8302 - RNA, 20 nt, synthetic construct
  misc_feature 1..20: note = spacer sequence
  source 1..20: mol_type = other RNA
agacttatagttttctggtg

SEQ ID NO: 8303 - RNA, 20 nt, synthetic construct
  misc_feature 1..20: note = spacer sequence
  source 1..20: mol_type = other RNA
agaagttgatgctaaacttc

SEQ ID NO: 8304 - RNA, 20 nt, synthetic construct
  misc_feature 1..20: note = spacer sequence
  source 1..20: mol_type = other RNA
ggtgagcataacaattcctt

SEQ ID NO: 8305 - RNA, 20 nt, synthetic construct
  misc_feature 1..20: note = spacer sequence
  source 1..20: mol_type = other RNA
ccagaaaactataagtctag

SEQ ID NO: 8306 - RNA, 20 nt, synthetic construct
  misc_feature 1..20: note = spacer sequence
  source 1..20: mol_type = other RNA
ttttattatcttaaaagaaa

SEQ ID NO: 8307 - RNA, 20 nt, synthetic construct
  misc_feature 1..20: note = spacer sequence
  source 1..20: mol_type = other RNA
taaaagaaaacattagagca

SEQ ID NO: 8308 - RNA, 20 nt, synthetic construct
  misc_feature 1..20: note = spacer sequence
  source 1..20: mol_type = other RNA
tttaagataataaaaggaat

SEQ ID NO: 8309 - RNA, 20 nt, synthetic construct
  misc_feature 1..20: note = spacer sequence
  source 1..20: mol_type = other RNA
aatgttttcttttaagataa

SEQ ID NO: 8310 - RNA, 20 nt, synthetic construct
  misc_feature 1..20: note = spacer sequence
  source 1..20: mol_type = other RNA
tggtgctctaatgttttctt

SEQ ID NO: 8311 - RNA, 20 nt, synthetic construct
  misc_feature 1..20: note = spacer sequence
  source 1..20: mol_type = other RNA
tcttggtgctctaatgtttt

SEQ ID NO: 8312 - RNA, 20 nt, synthetic construct
  misc_feature 1..20: note = spacer sequence
  source 1..20: mol_type = other RNA
tagttctgggattccatcac

SEQ ID NO: 8313 - RNA, 20 nt, synthetic construct
  misc_feature 1..20: note = spacer sequence
  source 1..20: mol_type = other RNA
gggattccatcacttgttat

SEQ ID NO: 8314 - RNA, 20 nt, synthetic construct
  misc_feature 1..20: note = spacer sequence
  source 1..20: mol_type = other RNA
cagaactaagatgctttggt

SEQ ID NO: 8315 - RNA, 20 nt, synthetic construct
  misc_feature 1..20: note = spacer sequence
  source 1..20: mol_type = other RNA
atcacttgttatcccaacct

SEQ ID NO: 8316 - RNA, 20 nt, synthetic construct
  misc_feature 1..20: note = spacer sequence
  source 1..20: mol_type = other RNA
cttgttatcccaacctaatt

SEQ ID NO: 8317 - RNA, 20 nt, synthetic construct
  misc_feature 1..20: note = spacer sequence
  source 1..20: mol_type = other RNA
caacctaattactgatcctt

SEQ ID NO: 8318 - RNA, 20 nt, synthetic construct
  misc_feature 1..20: note = spacer sequence
  source 1..20: mol_type = other RNA
gtaattaggttgggataaca

SEQ ID NO: 8319 - RNA, 20 nt, synthetic construct
  misc_feature 1..20: note = spacer sequence
  source 1..20: mol_type = other RNA
tttagtactgcaatactgca

SEQ ID NO: 8320 - RNA, 20 nt, synthetic construct
  misc_feature 1..20: note = spacer sequence
  source 1..20: mol_type = other RNA
ccacattcctttatcaaaat

SEQ ID NO: 8321 - RNA, 20 nt, synthetic construct
  misc_feature 1..20: note = spacer sequence
  source 1..20: mol_type = other RNA
tttatcaaaatgataaaact

SEQ ID NO: 8322 - RNA, 20 nt, synthetic construct
  misc_feature 1..20: note = spacer sequence
  source 1..20: mol_type = other RNA
aaatgataaaactggttagt

SEQ ID NO: 8323 - RNA, 20 nt, synthetic construct
  misc_feature 1..20: note = spacer sequence
  source 1..20: mol_type = other RNA
ttttgataaaggaatgtggt

SEQ ID NO: 8324 - RNA, 20 nt, synthetic construct
  misc_feature 1..20: note = spacer sequence
  source 1..20: mol_type = other RNA
tagatgaacccttcttaact

SEQ ID NO: 8325 - RNA, 20 nt, synthetic construct
  misc_feature 1..20: note = spacer sequence
  source 1..20: mol_type = other RNA
aagactaaccagttttatca

SEQ ID NO: 8326 - RNA, 20 nt, synthetic construct
  misc_feature 1..20: note = spacer sequence
  source 1..20: mol_type = other RNA
tctaagactaaccagtttta

SEQ ID NO: 8327 - RNA, 20 nt, synthetic construct
  misc_feature 1..20: note = spacer sequence
  source 1..20: mol_type = other RNA
taacttgcatacacatttaa

SEQ ID NO: 8328 - RNA, 20 nt, synthetic construct
  misc_feature 1..20: note = spacer sequence
  source 1..20: mol_type = other RNA
ttcctctataaggtcaaaat

SEQ ID NO: 8329 - RNA, 20 nt, synthetic construct
  misc_feature 1..20: note = spacer sequence
  source 1..20: mol_type = other RNA
tctataaggtcaaaattcct

SEQ ID NO: 8330 - RNA, 20 nt, synthetic construct
  misc_feature 1..20: note = spacer sequence
  source 1..20: mol_type = other RNA
ataaggtcaaaattcctgtg

SEQ ID NO: 8331 - RNA, 20 nt, synthetic construct
  misc_feature 1..20: note = spacer sequence
  source 1..20: mol_type = other RNA
aaattcctgtgatattcttt

SEQ ID NO: 8332 - RNA, 20 nt, synthetic construct
  misc_feature 1..20: note = spacer sequence
  source 1..20: mol_type = other RNA
tgtgatattcttttcaagac

SEQ ID NO: 8333 - RNA, 20 nt, synthetic construct
  misc_feature 1..20: note = spacer sequence
  source 1..20: mol_type = other RNA
caggaattttgaccttatag

SEQ ID NO: 8334 - RNA, 20 nt, synthetic construct
  misc_feature 1..20: note = spacer sequence
  source 1..20: mol_type = other RNA
tttcaagactgctgactgaa

SEQ ID NO: 8335 - RNA, 20 nt, synthetic construct
  misc_feature 1..20: note = spacer sequence
  source 1..20: mol_type = other RNA
agactgctgactgaaggcac

SEQ ID NO: 8336 - RNA, 20 nt, synthetic construct
  misc_feature 1..20: note = spacer sequence
  source 1..20: mol_type = other RNA
tgaaaagaatatcacaggaa

SEQ ID NO: 8337 - RNA, 20 nt, synthetic construct
  misc_feature 1..20: note = spacer sequence
  source 1..20: mol_type = other RNA
gcagtcttgaaaagaatatc

SEQ ID NO: 8338 - RNA, 20 nt, synthetic construct
  misc_feature 1..20: note = spacer sequence
  source 1..20: mol_type = other RNA
gtcagcagtcttgaaaagaa

SEQ ID NO: 8339 - RNA, 20 nt, synthetic construct
  misc_feature 1..20: note = spacer sequence
  source 1..20: mol_type = other RNA
atgtgccttcagtcagcagt

SEQ ID NO: 8340 - RNA, 20 nt, synthetic construct
  misc_feature 1..20: note = spacer sequence
  source 1..20: mol_type = other RNA
ttctcatgactgaactaaca

SEQ ID NO: 8341 - RNA, 20 nt, synthetic construct
  misc_feature 1..20: note = spacer sequence
  source 1..20: mol_type = other RNA
catgactgaactaacatatt

SEQ ID NO: 8342 - RNA, 20 nt, synthetic construct
  misc_feature 1..20: note = spacer sequence
  source 1..20: mol_type = other RNA
tgactgaactaacatattgc

SEQ ID NO: 8343 - RNA, 20 nt, synthetic construct
  misc_feature 1..20: note = spacer sequence
  source 1..20: mol_type = other RNA
tgagaaagaaagccttccat

SEQ ID NO: 8344 - RNA, 20 nt, synthetic construct
  misc_feature 1..20: note = spacer sequence
  source 1..20: mol_type = other RNA
gtcatgagaaagaaagcctt

SEQ ID NO: 8345 - RNA, 20 nt, synthetic construct
  misc_feature 1..20: note = spacer sequence
  source 1..20: mol_type = other RNA
aagtgcttattttaacaaaa

SEQ ID NO: 8346 - RNA, 20 nt, synthetic construct
  misc_feature 1..20: note = spacer sequence
  source 1..20: mol_type = other RNA
cttttcttatgtcaaattct

SEQ ID NO: 8347 - RNA, 20 nt, synthetic construct
  misc_feature 1..20: note = spacer sequence
  source 1..20: mol_type = other RNA
tatgtcaaattctaaaccct

SEQ ID NO: 8348 - RNA, 20 nt, synthetic construct
  misc_feature 1..20: note = spacer sequence
  source 1..20: mol_type = other RNA
aattctaaacccttctggat

SEQ ID NO: 8349 - RNA, 20 nt, synthetic construct
  misc_feature 1..20: note = spacer sequence
  source 1..20: mol_type = other RNA
aaacccttctggatttagaa

SEQ ID NO: 8350 - RNA, 20 nt, synthetic construct
  misc_feature 1..20: note = spacer sequence
  source 1..20: mol_type = other RNA
ggatttagaatagccttcaa

SEQ ID NO: 8351 - RNA, 20 nt, synthetic construct
  misc_feature 1..20: note = spacer sequence
  source 1..20: mol_type = other RNA
agaagggtttagaatttgac

SEQ ID NO: 8352 - RNA, 20 nt, synthetic construct
  misc_feature 1..20: note = spacer sequence
  source 1..20: mol_type = other RNA
aaatccagaagggtttagaa

SEQ ID NO: 8353 - RNA, 20 nt, synthetic construct
  misc_feature 1..20: note = spacer sequence
  source 1..20: mol_type = other RNA
attttaaaattctgttttag

SEQ ID NO: 8354 - RNA, 20 nt, synthetic construct
  misc_feature 1..20: note = spacer sequence
  source 1..20: mol_type = other RNA
gttttagaacgaagataatc

SEQ ID NO: 8355 - RNA, 20 nt, synthetic construct
  misc_feature 1..20: note = spacer sequence
  source 1..20: mol_type = other RNA
aaaacagaattttaaaattg

SEQ ID NO: 8356 - RNA, 20 nt, synthetic construct
  misc_feature 1..20: note = spacer sequence
  source 1..20: mol_type = other RNA
ttctaaaacagaattttaaa

SEQ ID NO: 8357 - RNA, 20 nt, synthetic construct
  misc_feature 1..20: note = spacer sequence
  source 1..20: mol_type = other RNA
tcgttctaaaacagaatttt

SEQ ID NO: 8358 - RNA, 20 nt, synthetic construct
  misc_feature 1..20: note = spacer sequence
  source 1..20: mol_type = other RNA
tcagaagtaaaatatgaaca

SEQ ID NO: 8359 - RNA, 20 nt, synthetic construct
  misc_feature 1..20: note = spacer sequence
  source 1..20: mol_type = other RNA
gaagtaaaatatgaacagtc

SEQ ID NO: 8360 - RNA, 20 nt, synthetic construct
  misc_feature 1..20: note = spacer sequence
  source 1..20: mol_type = other RNA
gatgattatcttcgttctaa

SEQ ID NO: 8361 - RNA, 20 nt, synthetic construct
  misc_feature 1..20: note = spacer sequence
  source 1..20: mol_type = other RNA
tattttacttctgatgatta

SEQ ID NO: 8362 - RNA, 20 nt, synthetic construct
  misc_feature 1..20: note = spacer sequence
  source 1..20: mol_type = other RNA
tgcattgaaaaccacccgct

SEQ ID NO: 8363 - RNA, 20 nt, synthetic construct
  misc_feature 1..20: note = spacer sequence
  source 1..20: mol_type = other RNA
atgcaggactgttcatattt

SEQ ID NO: 8364 - RNA, 20 nt, synthetic construct
  misc_feature 1..20: note = spacer sequence
  source 1..20: mol_type = other RNA
tgtaacaaatgttcccctct

SEQ ID NO: 8365 - RNA, 20 nt, synthetic construct
  misc_feature 1..20: note = spacer sequence
  source 1..20: mol_type = other RNA
cctctcatgggtccatctag

SEQ ID NO: 8366 - RNA, 20 nt, synthetic construct
  misc_feature 1..20: note = spacer sequence
  source 1..20: mol_type = other RNA
catgggtccatctagtggga

SEQ ID NO: 8367 - RNA, 20 nt, synthetic construct
  misc_feature 1..20: note = spacer sequence
  source 1..20: mol_type = other RNA
tgggtccatctagtgggagg

SEQ ID NO: 8368 - RNA, 20 nt, synthetic construct
  misc_feature 1..20: note = spacer sequence
  source 1..20: mol_type = other RNA
atctagtgggaggaagatgg

SEQ ID NO: 8369 - RNA, 20 nt, synthetic construct
  misc_feature 1..20: note = spacer sequence
  source 1..20: mol_type = other RNA
agtgggaggaagatggacat

SEQ ID NO: 8370 - RNA, 20 nt, synthetic construct
  misc_feature 1..20: note = spacer sequence
  source 1..20: mol_type = other RNA
cactagatggacccatgaga

SEQ ID NO: 8371 - RNA, 20 nt, synthetic construct
  misc_feature 1..20: note = spacer sequence
  source 1..20: mol_type = other RNA
tcccactagatggacccatg

SEQ ID NO: 8372 - RNA, 20 nt, synthetic construct
  misc_feature 1..20: note = spacer sequence
  source 1..20: mol_type = other RNA
tcctcccactagatggaccc

SEQ ID NO: 8373 - RNA, 20 nt, synthetic construct
  misc_feature 1..20: note = spacer sequence
  source 1..20: mol_type = other RNA
atcttcctcccactagatgg

SEQ ID NO: 8374 - RNA, 20 nt, synthetic construct
  misc_feature 1..20: note = spacer sequence
  source 1..20: mol_type = other RNA
ggtgatgataaacgctacga

SEQ ID NO: 8375 - RNA, 20 nt, synthetic construct
  misc_feature 1..20: note = spacer sequence
  source 1..20: mol_type = other RNA
cctgacatactgtttgcatg

SEQ ID NO: 8376 - RNA, 20 nt, synthetic construct
  misc_feature 1..20: note = spacer sequence
  source 1..20: mol_type = other RNA
tcacctgacatactgtttgc

SEQ ID NO: 8377 - RNA, 20 nt, synthetic construct
  misc_feature 1..20: note = spacer sequence
  source 1..20: mol_type = other RNA
tagcgtttatcatcacctga

SEQ ID NO: 8378 - RNA, 20 nt, synthetic construct
  misc_feature 1..20: note = spacer sequence
  source 1..20: mol_type = other RNA
gtcgtagcgtttatcatcac

SEQ ID NO: 8379 - RNA, 20 nt, synthetic construct
  misc_feature 1..20: note = spacer sequence
  source 1..20: mol_type = other RNA
gaatttaattacttttctag

SEQ ID NO: 8380 - RNA, 20 nt, synthetic construct
  misc_feature 1..20: note = spacer sequence
  source 1..20: mol_type = other RNA
gaatcagtcgtagcgtttat

SEQ ID NO: 8381 - RNA, 20 nt, synthetic construct
  misc_feature 1..20: note = spacer sequence
  source 1..20: mol_type = other RNA
agccatgcctagcttactat

SEQ ID NO: 8382 - RNA, 20 nt, synthetic construct
  misc_feature 1..20: note = spacer sequence
  source 1..20: mol_type = other RNA
aagctcaccgacttctcatc

SEQ ID NO: 8383 - RNA, 20 nt, synthetic construct
  misc_feature 1..20: note = spacer sequence
  source 1..20: mol_type = other RNA
ccgacttctcatctgtgttt

SEQ ID NO: 8384 - RNA, 20 nt, synthetic construct
  misc_feature 1..20: note = spacer sequence
  source 1..20: mol_type = other RNA
gtgagcttggaaaaacatag

SEQ ID NO: 8385 - RNA, 20 nt, synthetic construct
  misc_feature 1..20: note = spacer sequence
  source 1..20: mol_type = other RNA
catctgtgtttggttgcaca

SEQ ID NO: 8386 - RNA, 20 nt, synthetic construct
  misc_feature 1..20: note = spacer sequence
  source 1..20: mol_type = other RNA
tctgtgtttggttgcacatg

SEQ ID NO: 8387 - RNA, 20 nt, synthetic construct
  misc_feature 1..20: note = spacer sequence
  source 1..20: mol_type = other RNA
gtgtttggttgcacatgttg

SEQ ID NO: 8388 - RNA, 20 nt, synthetic construct
  misc_feature 1..20: note = spacer sequence
  source 1..20: mol_type = other RNA
aacatgtgcaaccaaacaca

SEQ ID NO: 8389 - RNA, 20 nt, synthetic construct
  misc_feature 1..20: note = spacer sequence
  source 1..20: mol_type = other RNA
gcatccaacatgtgcaacca

SEQ ID NO: 8390 - RNA, 20 nt, synthetic construct
  misc_feature 1..20: note = spacer sequence
  source 1..20: mol_type = other RNA
gtagtgataagaaataacag

SEQ ID NO: 8391 - RNA, 20 nt, synthetic construct
  misc_feature 1..20: note = spacer sequence
  source 1..20: mol_type = other RNA
ctactgaacatacaatttaa

SEQ ID NO: 8392 - RNA, 20 nt, synthetic construct
  misc_feature 1..20: note = spacer sequence
  source 1..20: mol_type = other RNA
tatcactactgaacatacaa

SEQ ID NO: 8393 - RNA, 20 nt, synthetic construct
  misc_feature 1..20: note = spacer sequence
  source 1..20: mol_type = other RNA
tcaagacctaaatgttaaat

SEQ ID NO: 8394 - RNA, 20 nt, synthetic construct
  misc_feature 1..20: note = spacer sequence
  source 1..20: mol_type = other RNA
agacctaaatgttaaatcac

SEQ ID NO: 8395 - RNA, 20 nt, synthetic construct
  misc_feature 1..20: note = spacer sequence
  source 1..20: mol_type = other RNA
tgaagaccctgcctgttatt

SEQ ID NO: 8396 - RNA, 20 nt, synthetic construct
  misc_feature 1..20: note = spacer sequence
  source 1..20: mol_type = other RNA
caggcaggctacttactacg

SEQ ID NO: 8397 - RNA, 20 nt, synthetic construct
  misc_feature 1..20: note = spacer sequence
  source 1..20: mol_type = other RNA
cagttgcttgaaagcagtgg

SEQ ID NO: 8398 - RNA, 20 nt, synthetic construct
  misc_feature 1..20: note = spacer sequence
  source 1..20: mol_type = other RNA
agcaactgtgaagcgtagta

SEQ ID NO: 8399 - RNA, 20 nt, synthetic construct
  misc_feature 1..20: note = spacer sequence
  source 1..20: mol_type = other RNA
tggagttcatgagatctttt

SEQ ID NO: 8400 - RNA, 20 nt, synthetic construct
  misc_feature 1..20: note = spacer sequence
  source 1..20: mol_type = other RNA
aggagtttaataaccactgc

SEQ ID NO: 8401 - RNA, 20 nt, synthetic construct
  misc_feature 1..20: note = spacer sequence
  source 1..20: mol_type = other RNA
tgagatcttttcactcattc

SEQ ID NO: 8402 - RNA, 20 nt, synthetic construct
  misc_feature 1..20: note = spacer sequence
  source 1..20: mol_type = other RNA
tgaactccaggagtttaata

SEQ ID NO: 8403 - RNA, 20 nt, synthetic construct
  misc_feature 1..20: note = spacer sequence
  source 1..20: mol_type = other RNA
catgaactccaggagtttaa

SEQ ID NO: 8404 - RNA, 20 nt, synthetic construct
  misc_feature 1..20: note = spacer sequence
  source 1..20: mol_type = other RNA
tttcactcattcaataaatt

SEQ ID NO: 8405 - RNA, 20 nt, synthetic construct
  misc_feature 1..20: note = spacer sequence
  source 1..20: mol_type = other RNA
ctcattcaataaatttatta

SEQ ID NO: 8406 - RNA, 20 nt, synthetic construct
  misc_feature 1..20: note = spacer sequence
  source 1..20: mol_type = other RNA
ttcaataaatttattaaacc

SEQ ID NO: 8407 - RNA, 20 nt, synthetic construct
  misc_feature 1..20: note = spacer sequence
  source 1..20: mol_type = other RNA
ataaatttattaaacccagt

SEQ ID NO: 8408 - RNA, 20 nt, synthetic construct
  misc_feature 1..20: note = spacer sequence
  source 1..20: mol_type = other RNA
ggtagtctaacatccatgga

SEQ ID NO: 8409 - RNA, 20 nt, synthetic construct
  misc_feature 1..20: note = spacer sequence
  source 1..20: mol_type = other RNA
aacatccatggaccttagat

SEQ ID NO: 8410 - RNA, 20 nt, synthetic construct
  misc_feature 1..20: note = spacer sequence
  source 1..20: mol_type = other RNA
atggaccttagattaggatt

SEQ ID NO: 8411 - RNA, 20 nt, synthetic construct
  misc_feature 1..20: note = spacer sequence
  source 1..20: mol_type = other RNA
atggatgttagactacctga

SEQ ID NO: 8412 - RNA, 20 nt, synthetic construct
  misc_feature 1..20: note = spacer sequence
  source 1..20: mol_type = other RNA
aaggtccatggatgttagac

SEQ ID NO: 8413 - RNA, 20 nt, synthetic construct
  misc_feature 1..20: note = spacer sequence
  source 1..20: mol_type = other RNA
taatctaaggtccatggatg

SEQ ID NO: 8414 - RNA, 20 nt, synthetic construct
  misc_feature 1..20: note = spacer sequence
  source 1..20: mol_type = other RNA
taatcaagggtgtgtatgtg

SEQ ID NO: 8415 - RNA, 20 nt, synthetic construct
  misc_feature 1..20: note = spacer sequence
  source 1..20: mol_type = other RNA
agggtgtgtatgtgggatgt

SEQ ID NO: 8416 - RNA, 20 nt, synthetic construct
  misc_feature 1..20: note = spacer sequence
  source 1..20: mol_type = other RNA
cacatacacacccttgatta

SEQ ID NO: 8417 - RNA, 20 nt, synthetic construct
  misc_feature 1..20: note = spacer sequence
  source 1..20: mol_type = other RNA
catcccacatacacaccctt

SEQ ID NO: 8418 - RNA, 20 nt, synthetic construct
  misc_feature 1..20: note = spacer sequence
  source 1..20: mol_type = other RNA
tcacatcccacatacacacc

SEQ ID NO: 8419 - RNA, 20 nt, synthetic construct
  misc_feature 1..20: note = spacer sequence
  source 1..20: mol_type = other RNA
agattctgtgattcttgtgc

SEQ ID NO: 8420 - RNA, 20 nt, synthetic construct
  misc_feature 1..20: note = spacer sequence
  source 1..20: mol_type = other RNA
ggatagcaaccccttcttca

SEQ ID NO: 8421 - RNA, 20 nt, synthetic construct
  misc_feature 1..20: note = spacer sequence
  source 1..20: mol_type = other RNA
gtgattcttgtgcaatcatg

SEQ ID NO: 8422 - RNA, 20 nt, synthetic construct
  misc_feature 1..20: note = spacer sequence
  source 1..20: mol_type = other RNA
cagaatctggatagcaaccc

SEQ ID NO: 8423 - RNA, 20 nt, synthetic construct
  misc_feature 1..20: note = spacer sequence
  source 1..20: mol_type = other RNA
tgtgcaatcatgttaatatg

SEQ ID NO: 8424 - RNA, 20 nt, synthetic construct
  misc_feature 1..20: note = spacer sequence
  source 1..20: mol_type = other RNA
tgttaatatgaaaaaaaaaa

SEQ ID NO: 8425 - RNA, 20 nt, synthetic construct
  misc_feature 1..20: note = spacer sequence
  source 1..20: mol_type = other RNA
tattaacatgattgcacaag

SEQ ID NO: 8426 - RNA, 20 nt, synthetic construct
  misc_feature 1..20: note = spacer sequence
  source 1..20: mol_type = other RNA
tttttgttatgctttttttt

SEQ ID NO: 8427 - RNA, 20 nt, synthetic construct
  misc_feature 1..20: note = spacer sequence
  source 1..20: mol_type = other RNA
ttgcatcttttttgttatgc

SEQ ID NO: 8428 - RNA, 20 nt, synthetic construct
  misc_feature 1..20: note = spacer sequence
  source 1..20: mol_type = other RNA
ctggttcctagtccaatgtt

SEQ ID NO: 8429 - RNA, 20 nt, synthetic construct
  misc_feature 1..20: note = spacer sequence
  source 1..20: mol_type = other RNA
tagtccaatgttccttctat

SEQ ID NO: 8430 - RNA, 20 nt, synthetic construct
  misc_feature 1..20: note = spacer sequence
  source 1..20: mol_type = other RNA
aatgttccttctatgatatg

SEQ ID NO: 8431 - RNA, 20 nt, synthetic construct
  misc_feature 1..20: note = spacer sequence
  source 1..20: mol_type = other RNA
ttctatgatatgacttccat

SEQ ID NO: 8432 - RNA, 20 nt, synthetic construct
  misc_feature 1..20: note = spacer sequence
  source 1..20: mol_type = other RNA
atgatatgacttccattgga

SEQ ID NO: 8433 - RNA, 20 nt, synthetic construct
  misc_feature 1..20: note = spacer sequence
  source 1..20: mol_type = other RNA
tagaaggaacattggactag

SEQ ID NO: 8434 - RNA, 20 nt, synthetic construct
  misc_feature 1..20: note = spacer sequence
  source 1..20: mol_type = other RNA
tatcatagaaggaacattgg

SEQ ID NO: 8435 - RNA, 20 nt, synthetic construct
  misc_feature 1..20: note = spacer sequence
  source 1..20: mol_type = other RNA
attggaaggtagacctctta

SEQ ID NO: 8436 - RNA, 20 nt, synthetic construct
  misc_feature 1..20: note = spacer sequence
  source 1..20: mol_type = other RNA
aatggaagtcatatcataga

SEQ ID NO: 8437 - RNA, 20 nt, synthetic construct
  misc_feature 1..20: note = spacer sequence
  source 1..20: mol_type = other RNA
accttccaatggaagtcata

SEQ ID NO: 8438 - RNA, 20 nt, synthetic construct
  misc_feature 1..20: note = spacer sequence
  source 1..20: mol_type = other RNA
taagcaacttcctcattaaa

SEQ ID NO: 8439 - RNA, 20 nt, synthetic construct
  misc_feature 1..20: note = spacer sequence
  source 1..20: mol_type = other RNA
tcattaaacaaatcattttc

SEQ ID NO: 8440 - RNA, 20 nt, synthetic construct
  misc_feature 1..20: note = spacer sequence
  source 1..20: mol_type = other RNA
ttaaacaaatcattttccat

SEQ ID NO: 8441 - RNA, 20 nt, synthetic construct
  misc_feature 1..20: note = spacer sequence
  source 1..20: mol_type = other RNA
ttttccatcattatggtaac

SEQ ID NO: 8442 - RNA, 20 nt, synthetic construct
  misc_feature 1..20: note = spacer sequence
  source 1..20: mol_type = other RNA
atcattatggtaactacact

SEQ ID NO: 8443 - RNA, 20 nt, synthetic construct
  misc_feature 1..20: note = spacer sequence
  source 1..20: mol_type = other RNA
ttatggtaactacactcctg

SEQ ID NO: 8444 - RNA, 20 nt, synthetic construct
  misc_feature 1..20: note = spacer sequence
  source 1..20: mol_type = other RNA
tgtatcacttgtgataaatt

SEQ ID NO: 8445 - RNA, 20 nt, synthetic construct
  misc_feature 1..20: note = spacer sequence
  source 1..20: mol_type = other RNA
cttgtgataaattttaatcc

SEQ ID NO: 8446 - RNA, 20 nt, synthetic construct
  misc_feature 1..20: note = spacer sequence
  source 1..20: mol_type = other RNA
caagtgatacaggagtgtag

SEQ ID NO: 8447 - RNA, 20 nt, synthetic construct
  misc_feature 1..20: note = spacer sequence
  source 1..20: mol_type = other RNA
caaatcctcttttaccatta

SEQ ID NO: 8448 - RNA, 20 nt, synthetic construct
  misc_feature 1..20: note = spacer sequence
  source 1..20: mol_type = other RNA
tcttttaccattacccaatc

SEQ ID NO: 8449 - RNA, 20 nt, synthetic construct
  misc_feature 1..20: note = spacer sequence
  source 1..20: mol_type = other RNA
tttaccattacccaatctgt

SEQ ID NO: 8450 - RNA, 20 nt, synthetic construct
  misc_feature 1..20: note = spacer sequence
  source 1..20: mol_type = other RNA
gtgtactaagggaaataaac

SEQ ID NO: 8451 - RNA, 20 nt, synthetic construct
  misc_feature 1..20: note = spacer sequence
  source 1..20: mol_type = other RNA
cttagtacacagattgggta

SEQ ID NO: 8452 - RNA, 20 nt, synthetic construct
  misc_feature 1..20: note = spacer sequence
  source 1..20: mol_type = other RNA
aggctattatcagcctaagc

SEQ ID NO: 8453 - RNA, 20 nt, synthetic construct
  misc_feature 1..20: note = spacer sequence
  source 1..20: mol_type = other RNA
gcctaagcttagtctagggg

SEQ ID NO: 8454 - RNA, 20 nt, synthetic construct
  misc_feature 1..20: note = spacer sequence
  source 1..20: mol_type = other RNA
aggggagggcagaatacagt

SEQ ID NO: 8455 - RNA, 20 nt, synthetic construct
  misc_feature 1..20: note = spacer sequence
  source 1..20: mol_type = other RNA
cctagactaagcttaggctg

SEQ ID NO: 8456 - RNA, 20 nt, synthetic construct
  misc_feature 1..20: note = spacer sequence
  source 1..20: mol_type = other RNA
gccctcccctagactaagct

SEQ ID NO: 8457 - RNA, 20 nt, synthetic construct
  misc_feature 1..20: note = spacer sequence
  source 1..20: mol_type = other RNA
aacagtactgaatagcatag

SEQ ID NO: 8458 - RNA, 20 nt, synthetic construct
  misc_feature 1..20: note = spacer sequence
  source 1..20: mol_type = other RNA
gtactgttggaattttttat

SEQ ID NO: 8459 - RNA, 20 nt, synthetic construct
  misc_feature 1..20: note = spacer sequence
  source 1..20: mol_type = other RNA
cctatgctattcagtactgt

SEQ ID NO: 8460 - RNA, 20 nt, synthetic construct
  misc_feature 1..20: note = spacer sequence
  source 1..20: mol_type = other RNA
tccattacaaaccaatgtct

SEQ ID NO: 8461 - RNA, 20 nt, synthetic construct
  misc_feature 1..20: note = spacer sequence
  source 1..20: mol_type = other RNA
attacaaaccaatgtctcac

SEQ ID NO: 8462 - RNA, 20 nt, synthetic construct
  misc_feature 1..20: note = spacer sequence
  source 1..20: mol_type = other RNA
cacagtcctacatctcagag

SEQ ID NO: 8463 - RNA, 20 nt, synthetic construct
  misc_feature 1..20: note = spacer sequence
  source 1..20: mol_type = other RNA
cagtcctacatctcagaggt

SEQ ID NO: 8464 - RNA, 20 nt, synthetic construct
  misc_feature 1..20: note = spacer sequence
  source 1..20: mol_type = other RNA
tacatctcagaggtaatcaa

SEQ ID NO: 8465 - RNA, 20 nt, synthetic construct
  misc_feature 1..20: note = spacer sequence
  source 1..20: mol_type = other RNA
cagaggtaatcaataggttc

SEQ ID NO: 8466 - RNA, 20 nt, synthetic construct
  misc_feature 1..20: note = spacer sequence
  source 1..20: mol_type = other RNA
gaggtaatcaataggttctt

SEQ ID NO: 8467 - RNA, 20 nt, synthetic construct
  misc_feature 1..20: note = spacer sequence
  source 1..20: mol_type = other RNA
gagatgtaggactgtgagac

SEQ ID NO: 8468 - RNA, 20 nt, synthetic construct
  misc_feature 1..20: note = spacer sequence
  source 1..20: mol_type = other RNA
ataggttctttcctaaaaca

SEQ ID NO: 8469 - RNA, 20 nt, synthetic construct
  misc_feature 1..20: note = spacer sequence
  source 1..20: mol_type = other RNA
ttcctaaaacaactcagatt

SEQ ID NO: 8470 - RNA, 20 nt, synthetic construct
  misc_feature 1..20: note = spacer sequence
  source 1..20: mol_type = other RNA
taaaacaactcagattatga

SEQ ID NO: 8471 - RNA, 20 nt, synthetic construct
  misc_feature 1..20: note = spacer sequence
  source 1..20: mol_type = other RNA
gattatgaaagcaaacaggc

SEQ ID NO: 8472 - RNA, 20 nt, synthetic construct
  misc_feature 1..20: note = spacer sequence
  source 1..20: mol_type = other RNA
gagttgttttaggaaagaac

SEQ ID NO: 8473 - RNA, 20 nt, synthetic construct
  misc_feature 1..20: note = spacer sequence
  source 1..20: mol_type = other RNA
taatctgagttgttttagga

SEQ ID NO: 8474 - RNA, 20 nt, synthetic construct
  misc_feature 1..20: note = spacer sequence
  source 1..20: mol_type = other RNA
aaggtatatgcatatgcctg

SEQ ID NO: 8475 - RNA, 20 nt, synthetic construct
  misc_feature 1..20: note = spacer sequence
  source 1..20: mol_type = other RNA
caggactagaacactgtaat

SEQ ID NO: 8476 - RNA, 20 nt, synthetic construct
  misc_feature 1..20: note = spacer sequence
  source 1..20: mol_type = other RNA
tgtgagcccatagtattttt

SEQ ID NO: 8477 - RNA, 20 nt, synthetic construct
  misc_feature 1..20: note = spacer sequence
  source 1..20: mol_type = other RNA
agtcctgtgagcccatagta

SEQ ID NO: 8478 - RNA, 20 nt, synthetic construct
  misc_feature 1..20: note = spacer sequence
  source 1..20: mol_type = other RNA
caagatattaacttccagtt

SEQ ID NO: 8479 - RNA, 20 nt, synthetic construct
  misc_feature 1..20: note = spacer sequence
  source 1..20: mol_type = other RNA
agatattaacttccagttag

SEQ ID NO: 8480 - RNA, 20 nt, synthetic construct
  misc_feature 1..20: note = spacer sequence
  source 1..20: mol_type = other RNA
tgagagtattacagtgttct

SEQ ID NO: 8481 - RNA, 20 nt, synthetic construct
  misc_feature 1..20: note = spacer sequence
  source 1..20: mol_type = other RNA
agttaggggattcaagtgtt

SEQ ID NO: 8482 - RNA, 20 nt, synthetic construct
  misc_feature 1..20: note = spacer sequence
  source 1..20: mol_type = other RNA
cctaactggaagttaatatc

SEQ ID NO: 8483 - RNA, 20 nt, synthetic construct
  misc_feature 1..20: note = spacer sequence
  source 1..20: mol_type = other RNA
agtgttaattatatttggca

SEQ ID NO: 8484 - RNA, 20 nt, synthetic construct
  misc_feature 1..20: note = spacer sequence
  source 1..20: mol_type = other RNA
aatacaacaatttgttaatt

SEQ ID NO: 8485 - RNA, 20 nt, synthetic construct
  misc_feature 1..20: note = spacer sequence
  source 1..20: mol_type = other RNA
tttaaattaacaaattgttg

SEQ ID NO: 8486 - RNA, 20 nt, synthetic construct
  misc_feature 1..20: note = spacer sequence
  source 1..20: mol_type = other RNA
actgtaacaagcatgtgatg

SEQ ID NO: 8487 - RNA, 20 nt, synthetic construct
  misc_feature 1..20: note = spacer sequence
  source 1..20: mol_type = other RNA
catgcttgttacagtagacc

SEQ ID NO: 8488 - RNA, 20 nt, synthetic construct
  misc_feature 1..20: note = spacer sequence
  source 1..20: mol_type = other RNA
taacttaagcaggcaagagt

SEQ ID NO: 8489 - RNA, 20 nt, synthetic construct
  misc_feature 1..20: note = spacer sequence
  source 1..20: mol_type = other RNA
tgcctgcttaagttatgaat

SEQ ID NO: 8490 - RNA, 20 nt, synthetic construct
  misc_feature 1..20: note = spacer sequence
  source 1..20: mol_type = other RNA
ttaagcaggcttactcttgc

SEQ ID NO: 8491 - RNA, 20 nt, synthetic construct
  misc_feature 1..20: note = spacer sequence
  source 1..20: mol_type = other RNA
tttacatctttaagcaggct

SEQ ID NO: 8492 - RNA, 20 nt, synthetic construct
  misc_feature 1..20: note = spacer sequence
  source 1..20: mol_type = other RNA
aagtcacatcgcccttgatc

SEQ ID NO: 8493 - RNA, 20 nt, synthetic construct
  misc_feature 1..20: note = spacer sequence
  source 1..20: mol_type = other RNA
catcgcccttgatcacagta

SEQ ID NO: 8494 - RNA, 20 nt, synthetic construct
  misc_feature 1..20: note = spacer sequence
  source 1..20: mol_type = other RNA
cccttgatcacagtattgaa

SEQ ID NO: 8495 - RNA, 20 nt, synthetic construct
  misc_feature 1..20: note = spacer sequence
  source 1..20: mol_type = other RNA
agggcgatgtgacttagatc

SEQ ID NO: 8496 - RNA, 20 nt, synthetic construct
  misc_feature 1..20: note = spacer sequence
  source 1..20: mol_type = other RNA
cagtattgaagttgtgggta

SEQ ID NO: 8497 - RNA, 20 nt, synthetic construct
  misc_feature 1..20: note = spacer sequence
  source 1..20: mol_type = other RNA
atactgtgatcaagggcgat

SEQ ID NO: 8498 - RNA, 20 nt, synthetic construct
  misc_feature 1..20: note = spacer sequence
  source 1..20: mol_type = other RNA
gttgtactttttacccacaa

SEQ ID NO: 8499 - RNA, 20 nt, synthetic construct
  misc_feature 1..20: note = spacer sequence
  source 1..20: mol_type = other RNA
agccaagtaaactgagagtg

SEQ ID NO: 8500 - RNA, 20 nt, synthetic construct
  misc_feature 1..20: note = spacer sequence
  source 1..20: mol_type = other RNA
gtttacttggctggagttta

SEQ ID NO: 8501 - RNA, 20 nt, synthetic construct
  misc_feature 1..20: note = spacer sequence
  source 1..20: mol_type = other RNA
cagtttacttggctggagtt

SEQ ID NO: 8502 - RNA, 20 nt, synthetic construct
  misc_feature 1..20: note = spacer sequence
  source 1..20: mol_type = other RNA
ctctcagtttacttggctgg

SEQ ID NO: 8503 - RNA, 20 nt, synthetic construct
  misc_feature 1..20: note = spacer sequence
  source 1..20: mol_type = other RNA
cactcactctcagtttactt

SEQ ID NO: 8504 - RNA, 20 nt, synthetic construct
  misc_feature 1..20: note = spacer sequence
  source 1..20: mol_type = other RNA
ggctgcgcaactgttactta

SEQ ID NO: 8505 - RNA, 20 nt, synthetic construct
  misc_feature 1..20: note = spacer sequence
  source 1..20: mol_type = other RNA
aagtaacagttgcgcagcct

SEQ ID NO: 8506 - RNA, 20 nt, synthetic construct
  misc_feature 1..20: note = spacer sequence
  source 1..20: mol_type = other RNA
aataaaatggctttgttttc

SEQ ID NO: 8507 - RNA, 20 nt, synthetic construct
  misc_feature 1..20: note = spacer sequence
  source 1..20: mol_type = other RNA
aagatgatttctttgctagc

SEQ ID NO: 8508 - RNA, 20 nt, synthetic construct
  misc_feature 1..20: note = spacer sequence
  source 1..20: mol_type = other RNA
ttgatacattccaataaaat

SEQ ID NO: 8509 - RNA, 20 nt, synthetic construct
  misc_feature 1..20: note = spacer sequence
  source 1..20: mol_type = other RNA
tctttgatacattccaataa

SEQ ID NO: 8510 - RNA, 20 nt, synthetic construct
  misc_feature 1..20: note = spacer sequence
  source 1..20: mol_type = other RNA
ttgctagcccacaaagaacg

SEQ ID NO: 8511 - RNA, 20 nt, synthetic construct
  misc_feature 1..20: note = spacer sequence
  source 1..20: mol_type = other RNA
ttgtgggctagcaaagaaat

SEQ ID NO: 8512 - RNA, 20 nt, synthetic construct
  misc_feature 1..20: note = spacer sequence
  source 1..20: mol_type = other RNA
aggggtttcagatagataat

SEQ ID NO: 8513 - RNA, 20 nt, synthetic construct
  misc_feature 1..20: note = spacer sequence
  source 1..20: mol_type = other RNA
gatagataataattggtcca

SEQ ID NO: 8514 - RNA, 20 nt, synthetic construct
  misc_feature 1..20: note = spacer sequence
  source 1..20: mol_type = other RNA
gaaacccctggacttgggta

SEQ ID NO: 8515 - RNA, 20 nt, synthetic construct
  misc_feature 1..20: note = spacer sequence
  source 1..20: mol_type = other RNA
atctgaaacccctggacttg

SEQ ID NO: 8516 - RNA, 20 nt, synthetic construct
  misc_feature 1..20: note = spacer sequence
  source 1..20: mol_type = other RNA
agacagagaaaaacctatgc

SEQ ID NO: 8517 - RNA, 20 nt, synthetic construct
  misc_feature 1..20: note = spacer sequence
  source 1..20: mol_type = other RNA
ggaccaattattatctatct

SEQ ID NO: 8518 - RNA, 20 nt, synthetic construct
  misc_feature 1..20: note = spacer sequence
  source 1..20: mol_type = other RNA
gtctggaccaattattatct

SEQ ID NO: 8519 - RNA, 20 nt, synthetic construct
  misc_feature 1..20: note = spacer sequence
  source 1..20: mol_type = other RNA
ctgtctggaccaattattat

SEQ ID NO: 8520 - RNA, 20 nt, synthetic construct
  misc_feature 1..20: note = spacer sequence
  source 1..20: mol_type = other RNA
ttaacggcataggtttttct

SEQ ID NO: 8521 - RNA, 20 nt, synthetic construct
  misc_feature 1..20: note = spacer sequence
  source 1..20: mol_type = other RNA
cctaaaagctgggaagagac

SEQ ID NO: 8522 - RNA, 20 nt, synthetic construct
  misc_feature 1..20: note = spacer sequence
  source 1..20: mol_type = other RNA
taaaagctgggaagagacta

SEQ ID NO: 8523 - RNA, 20 nt, synthetic construct
  misc_feature 1..20: note = spacer sequence
  source 1..20: mol_type = other RNA
cagcttttaggagatacttc

SEQ ID NO: 8524 - RNA, 20 nt, synthetic construct
  misc_feature 1..20: note = spacer sequence
  source 1..20: mol_type = other RNA
tcccagcttttaggagatac

SEQ ID NO: 8525 - RNA, 20 nt, synthetic construct
  misc_feature 1..20: note = spacer sequence
  source 1..20: mol_type = other RNA
cttcccagcttttaggagat

SEQ ID NO: 8526 - RNA, 20 nt, synthetic construct
  misc_feature 1..20: note = spacer sequence
  source 1..20: mol_type = other RNA
cttaaccttagtctcttccc

SEQ ID NO: 8527 - RNA, 20 nt, synthetic construct
  misc_feature 1..20: note = spacer sequence
  source 1..20: mol_type = other RNA
taattcacttaaccttagtc

SEQ ID NO: 8528 - RNA, 20 nt, synthetic construct
  misc_feature 1..20: note = spacer sequence
  source 1..20: mol_type = other RNA
gtaccaattcctttgcacag

SEQ ID NO: 8529 - RNA, 20 nt, synthetic construct
  misc_feature 1..20: note = spacer sequence
  source 1..20: mol_type = other RNA
tttgcacagagattactttt

SEQ ID NO: 8530 - RNA, 20 nt, synthetic construct
  misc_feature 1..20: note = spacer sequence
  source 1..20: mol_type = other RNA
gtgcaaaggaattggtacag

SEQ ID NO: 8531 - RNA, 20 nt, synthetic construct
  misc_feature 1..20: note = spacer sequence
  source 1..20: mol_type = other RNA
ctgtgcaaaggaattggtac

SEQ ID NO: 8532 - RNA, 20 nt, synthetic construct
  misc_feature 1..20: note = spacer sequence
  source 1..20: mol_type = other RNA
tttttctataccaaataagg

SEQ ID NO: 8533 - RNA, 20 nt, synthetic construct
  misc_feature 1..20: note = spacer sequence
  source 1..20: mol_type = other RNA
ataccaaataaggatgtgaa

SEQ ID NO: 8534 - RNA, 20 nt, synthetic construct
  misc_feature 1..20: note = spacer sequence
  source 1..20: mol_type = other RNA
ttatttggtatagaaaaatg

SEQ ID NO: 8535 - RNA, 20 nt, synthetic construct
  misc_feature 1..20: note = spacer sequence
  source 1..20: mol_type = other RNA
catccttatttggtatagaa

SEQ ID NO: 8536 - RNA, 20 nt, synthetic construct
  misc_feature 1..20: note = spacer sequence
  source 1..20: mol_type = other RNA
tcacatccttatttggtata

SEQ ID NO: 8537 - RNA, 20 nt, synthetic construct
  misc_feature 1..20: note = spacer sequence
  source 1..20: mol_type = other RNA
aaacttttattcaagacaga

SEQ ID NO: 8538 - RNA, 20 nt, synthetic construct
  misc_feature 1..20: note = spacer sequence
  source 1..20: mol_type = other RNA
agacagacaaacatgatttt

SEQ ID NO: 8539 - RNA, 20 nt, synthetic construct
  misc_feature 1..20: note = spacer sequence
  source 1..20: mol_type = other RNA
tgaataaaagtttggatctt

SEQ ID NO: 8540 - RNA, 20 nt, synthetic construct
  misc_feature 1..20: note = spacer sequence
  source 1..20: mol_type = other RNA
gtcttgaataaaagtttgga

SEQ ID NO: 8541 - RNA, 20 nt, synthetic construct
  misc_feature 1..20: note = spacer sequence
  source 1..20: mol_type = other RNA
tgtttgtctgtcttgaataa

SEQ ID NO: 8542 - RNA, 20 nt, synthetic construct
  misc_feature 1..20: note = spacer sequence
  source 1..20: mol_type = other RNA
ttgagattctctcttggtaa

SEQ ID NO: 8543 - RNA, 20 nt, synthetic construct
  misc_feature 1..20: note = spacer sequence
  source 1..20: mol_type = other RNA
aagacaaaatcatgtttgtc

SEQ ID NO: 8544 - RNA, 20 nt, synthetic construct
  misc_feature 1..20: note = spacer sequence
  source 1..20: mol_type = other RNA
caaagacaaaatcatgtttg

SEQ ID NO: 8545 - RNA, 20 nt, synthetic construct
  misc_feature 1..20: note = spacer sequence
  source 1..20: mol_type = other RNA
ctcttggtaaagatcaagta

SEQ ID NO: 8546 - RNA, 20 nt, synthetic construct
  misc_feature 1..20: note = spacer sequence
  source 1..20: mol_type = other RNA
cttggtaaagatcaagtaca

SEQ ID NO: 8547 - RNA, 20 nt, synthetic construct
  misc_feature 1..20: note = spacer sequence
  source 1..20: mol_type = other RNA
tggtaaagatcaagtacaca

SEQ ID NO: 8548 - RNA, 20 nt, synthetic construct
  misc_feature 1..20: note = spacer sequence
  source 1..20: mol_type = other RNA
ttaccaagagagaatctcaa

SEQ ID NO: 8549 - RNA, 20 nt, synthetic construct
  misc_feature 1..20: note = spacer sequence
  source 1..20: mol_type = other RNA
agtacacatatttgacttta

SEQ ID NO: 8550 - RNA, 20 nt, synthetic construct
  misc_feature 1..20: note = spacer sequence
  source 1..20: mol_type = other RNA
aatatgtgtacttgatcttt

SEQ ID NO: 8551 - RNA, 20 nt, synthetic construct
  misc_feature 1..20: note = spacer sequence
  source 1..20: mol_type = other RNA
taaagtcaaatatgtgtact

SEQ ID NO: 8552 - RNA, 20 nt, synthetic construct
  misc_feature 1..20: note = spacer sequence
  source 1..20: mol_type = other RNA
tcttaaagtcaaatatgtgt

SEQ ID NO: 8553 - RNA, 20 nt, synthetic construct
  misc_feature 1..20: note = spacer sequence
  source 1..20: mol_type = other RNA
tcctcttaaagtcaaatatg

SEQ ID NO: 8554 - RNA, 20 nt, synthetic construct
  misc_feature 1..20: note = spacer sequence
  source 1..20: mol_type = other RNA
tcctcaaaaacaaacaaaca

SEQ ID NO: 8555 - RNA, 20 nt, synthetic construct
  misc_feature 1..20: note = spacer sequence
  source 1..20: mol_type = other RNA
tcaaaaacaaacaaacaaac

SEQ ID NO: 8556 - RNA, 20 nt, synthetic construct
  misc_feature 1..20: note = spacer sequence
  source 1..20: mol_type = other RNA
aaaacaaacaaacaaacaaa

SEQ ID NO: 8557 - RNA, 20 nt, synthetic construct
  misc_feature 1..20: note = spacer sequence
  source 1..20: mol_type = other RNA
tggaaataattttaccaaaa

SEQ ID NO: 8558 - RNA, 20 nt, synthetic construct
  misc_feature 1..20: note = spacer sequence
  source 1..20: mol_type = other RNA
aagactggcttttttggttg

SEQ ID NO: 8559 - RNA, 20 nt, synthetic construct
  misc_feature 1..20: note = spacer sequence
  source 1..20: mol_type = other RNA
aacttggggatgggtggggg

SEQ ID NO: 8560 - RNA, 20 nt, synthetic construct
  misc_feature 1..20: note = spacer sequence
  source 1..20: mol_type = other RNA
ccaagttagatttttttaaa

SEQ ID NO: 8561 - RNA, 20 nt, synthetic construct
  misc_feature 1..20: note = spacer sequence
  source 1..20: mol_type = other RNA
ttgccccaccccccccccac

SEQ ID NO: 8562 - RNA, 20 nt, synthetic construct
  misc_feature 1..20: note = spacer sequence
  source 1..20: mol_type = other RNA
ttagttttccttgccccacc

SEQ ID NO: 8563 - RNA, 20 nt, synthetic construct
  misc_feature 1..20: note = spacer sequence
  source 1..20: mol_type = other RNA
tggtaagttattttttttta

SEQ ID NO: 8564 - RNA, 20 nt, synthetic construct
  misc_feature 1..20: note = spacer sequence
  source 1..20: mol_type = other RNA
cttcttggtaagttattttt

SEQ ID NO: 8565 - RNA, 20 nt, synthetic construct
  misc_feature 1..20: note = spacer sequence
  source 1..20: mol_type = other RNA
tgtaacccagcctgtttcac

SEQ ID NO: 8566 - RNA, 20 nt, synthetic construct
  misc_feature 1..20: note = spacer sequence
  source 1..20: mol_type = other RNA
gcccacccctcctgtaaccc

SEQ ID NO: 8567 - RNA, 20 nt, synthetic construct
  misc_feature 1..20: note = spacer sequence
  source 1..20: mol_type = other RNA
tgggtgcagcaggtggcacg

SEQ ID NO: 8568 - RNA, 20 nt, synthetic construct
  misc_feature 1..20: note = spacer sequence
  source 1..20: mol_type = other RNA
gccgtgccacctgctgcacc

SEQ ID NO: 8569 - RNA, 20 nt, synthetic construct
  misc_feature 1..20: note = spacer sequence
  source 1..20: mol_type = other RNA
cgctgtcaccagactcggcg

SEQ ID NO: 8570 - RNA, 20 nt, synthetic construct
  misc_feature 1..20: note = spacer sequence
  source 1..20: mol_type = other RNA
ccagactcggcgtttcctct

SEQ ID NO: 8571 - RNA, 20 nt, synthetic construct
  misc_feature 1..20: note = spacer sequence
  source 1..20: mol_type = other RNA
ggtgacagcgtgaaaatgta

SEQ ID NO: 8572 - RNA, 20 nt, synthetic construct
  misc_feature 1..20: note = spacer sequence
  source 1..20: mol_type = other RNA
gcgtttcctctagccccaga

SEQ ID NO: 8573 - RNA, 20 nt, synthetic construct
  misc_feature 1..20: note = spacer sequence
  source 1..20: mol_type = other RNA
tctagccccagacaccactg

SEQ ID NO: 8574 - RNA, 20 nt, synthetic construct
  misc_feature 1..20: note = spacer sequence
  source 1..20: mol_type = other RNA
agccccagacaccactgttg

SEQ ID NO: 8575 - RNA, 20 nt, synthetic construct
  misc_feature 1..20: note = spacer sequence
  source 1..20: mol_type = other RNA
ggggctagaggaaacgccga

SEQ ID NO: 8576 - RNA, 20 nt, synthetic construct
  misc_feature 1..20: note = spacer sequence
  source 1..20: mol_type = other RNA
aacagtggtgtctggggcta

SEQ ID NO: 8577 - RNA, 20 nt, synthetic construct
  misc_feature 1..20: note = spacer sequence
  source 1..20: mol_type = other RNA
cattccaacagtggtgtctg

SEQ ID NO: 8578 - RNA, 20 nt, synthetic construct
  misc_feature 1..20: note = spacer sequence
  source 1..20: mol_type = other RNA
aatagataagtcttttgtag

SEQ ID NO: 8579 - RNA, 20 nt, synthetic construct
  misc_feature 1..20: note = spacer sequence
  source 1..20: mol_type = other RNA
attggaaatcccattccaac

SEQ ID NO: 8580 - RNA, 20 nt, synthetic construct
  misc_feature 1..20: note = spacer sequence
  source 1..20: mol_type = other RNA
tttgtagtgtcttcatttat

SEQ ID NO: 8581 - RNA, 20 nt, synthetic construct
  misc_feature 1..20: note = spacer sequence
  source 1..20: mol_type = other RNA
tcatttataccagcgatagt

SEQ ID NO: 8582 - RNA, 20 nt, synthetic construct
  misc_feature 1..20: note = spacer sequence
  source 1..20: mol_type = other RNA
tttataccagcgatagtagc

SEQ ID NO: 8583 - RNA, 20 nt, synthetic construct
  misc_feature 1..20: note = spacer sequence
  source 1..20: mol_type = other RNA
ctggtataaatgaagacact

SEQ ID NO: 8584 - RNA, 20 nt, synthetic construct
  misc_feature 1..20: note = spacer sequence
  source 1..20: mol_type = other RNA
ttagctactatcgctggtat

SEQ ID NO: 8585 - RNA, 20 nt, synthetic construct
  misc_feature 1..20: note = spacer sequence
  source 1..20: mol_type = other RNA
acatgtgaagctgaataatt

SEQ ID NO: 8586 - RNA, 20 nt, synthetic construct
  misc_feature 1..20: note = spacer sequence
  source 1..20: mol_type = other RNA
catgttgatataattatatt

SEQ ID NO: 8587 - RNA, 20 nt, synthetic construct
  misc_feature 1..20: note = spacer sequence
  source 1..20: mol_type = other RNA
gcttcacatgttgatataat

SEQ ID NO: 8588 - RNA, 20 nt, synthetic construct
  misc_feature 1..20: note = spacer sequence
  source 1..20: mol_type = other RNA
cccggtcaacattcttatgc

SEQ ID NO: 8589 - RNA, 20 nt, synthetic construct
  misc_feature 1..20: note = spacer sequence
  source 1..20: mol_type = other RNA
cggtcaacattcttatgcca

SEQ ID NO: 8590 - RNA, 20 nt, synthetic construct
  misc_feature 1..20: note = spacer sequence
  source 1..20: mol_type = other RNA
acattcttatgccatactat

SEQ ID NO: 8591 - RNA, 20 nt, synthetic construct
  misc_feature 1..20: note = spacer sequence
  source 1..20: mol_type = other RNA
tatgccatactatagatcct

SEQ ID NO: 8592 - RNA, 20 nt, synthetic construct
  misc_feature 1..20: note = spacer sequence
  source 1..20: mol_type = other RNA
atagtatggcataagaatgt

SEQ ID NO: 8593 - RNA, 20 nt, synthetic construct
  misc_feature 1..20: note = spacer sequence
  source 1..20: mol_type = other RNA
tattaccgcttcactctccc

SEQ ID NO: 8594 - RNA, 20 nt, synthetic construct
  misc_feature 1..20: note = spacer sequence
  source 1..20: mol_type = other RNA
ctctccctcctacacccagc

SEQ ID NO: 8595 - RNA, 20 nt, synthetic construct
  misc_feature 1..20: note = spacer sequence
  source 1..20: mol_type = other RNA
ccctcctacacccagctcca

SEQ ID NO: 8596 - RNA, 20 nt, synthetic construct
  misc_feature 1..20: note = spacer sequence
  source 1..20: mol_type = other RNA
ctcctacacccagctccaag

SEQ ID NO: 8597 - RNA, 20 nt, synthetic construct
  misc_feature 1..20: note = spacer sequence
  source 1..20: mol_type = other RNA
tacacccagctccaagagga

SEQ ID NO: 8598 - RNA, 20 nt, synthetic construct
  misc_feature 1..20: note = spacer sequence
  source 1..20: mol_type = other RNA
aagaggataagcaaacacaa

SEQ ID NO: 8599 - RNA, 20 nt, synthetic construct
  misc_feature 1..20: note = spacer sequence
  source 1..20: mol_type = other RNA
tggagctgggtgtaggaggg

SEQ ID NO: 8600 - RNA, 20 nt, synthetic construct
  misc_feature 1..20: note = spacer sequence
  source 1..20: mol_type = other RNA
tcttggagctgggtgtagga

SEQ ID NO: 8601 - RNA, 20 nt, synthetic construct
  misc_feature 1..20: note = spacer sequence
  source 1..20: mol_type = other RNA
ttgtgtttgcttatcctctt

SEQ ID NO: 8602 - RNA, 20 nt, synthetic construct
  misc_feature 1..20: note = spacer sequence
  source 1..20: mol_type = other RNA
caaactgtaagcatgttttt

SEQ ID NO: 8603 - RNA, 20 nt, synthetic construct
  misc_feature 1..20: note = spacer sequence
  source 1..20: mol_type = other RNA
accaataagcatcccaaact

SEQ ID NO: 8604 - RNA, 20 nt, synthetic construct
  misc_feature 1..20: note = spacer sequence
  source 1..20: mol_type = other RNA
cactccaccaataagcatcc

SEQ ID NO: 8605 - RNA, 20 nt, synthetic construct
  misc_feature 1..20: note = spacer sequence
  source 1..20: mol_type = other RNA
tcacactccaccaataagca

SEQ ID NO: 8606 - RNA, 20 nt, synthetic construct
  misc_feature 1..20: note = spacer sequence
  source 1..20: mol_type = other RNA
tcctcacactccaccaataa

SEQ ID NO: 8607 - RNA, 20 nt, synthetic construct
  misc_feature 1..20: note = spacer sequence
  source 1..20: mol_type = other RNA
tcctcctcacactccaccaa

SEQ ID NO: 8608 - RNA, 20 nt, synthetic construct
  misc_feature 1..20: note = spacer sequence
  source 1..20: mol_type = other RNA
attcctcctcctcacactcc

SEQ ID NO: 8609 - RNA, 20 nt, synthetic construct
  misc_feature 1..20: note = spacer sequence
  source 1..20: mol_type = other RNA
accagtatccattcctcctc

SEQ ID NO: 8610 - RNA, 20 nt, synthetic construct
  misc_feature 1..20: note = spacer sequence
  source 1..20: mol_type = other RNA
tataactccaccagtatcca

SEQ ID NO: 8611 - RNA, 20 nt, synthetic construct
  misc_feature 1..20: note = spacer sequence
  source 1..20: mol_type = other RNA
aggaggcagaaaacctagaa

SEQ ID NO: 8612 - RNA, 20 nt, synthetic construct
  misc_feature 1..20: note = spacer sequence
  source 1..20: mol_type = other RNA
tggacccccacctcctataa

SEQ ID NO: 8613 - RNA, 20 nt, synthetic construct
  misc_feature 1..20: note = spacer sequence
  source 1..20: mol_type = other RNA
gcctcctggacccccacctc

SEQ ID NO: 8614 - RNA, 20 nt, synthetic construct
  misc_feature 1..20: note = spacer sequence
  source 1..20: mol_type = other RNA
aggttttctgcctcctggac

SEQ ID NO: 8615 - RNA, 20 nt, synthetic construct
  misc_feature 1..20: note = spacer sequence
  source 1..20: mol_type = other RNA
tattctaggttttctgcctc

SEQ ID NO: 8616 - RNA, 20 nt, synthetic construct
  misc_feature 1..20: note = spacer sequence
  source 1..20: mol_type = other RNA
acttatgctgtatcactcca

SEQ ID NO: 8617 - RNA, 20 nt, synthetic construct
  misc_feature 1..20: note = spacer sequence
  source 1..20: mol_type = other RNA
ctccatcgcaggctctaaag

SEQ ID NO: 8618 - RNA, 20 nt, synthetic construct
  misc_feature 1..20: note = spacer sequence
  source 1..20: mol_type = other RNA
atcgcaggctctaaagtatg

SEQ ID NO: 8619 - RNA, 20 nt, synthetic construct
  misc_feature 1..20: note = spacer sequence
  source 1..20: mol_type = other RNA
caggctctaaagtatgttca

SEQ ID NO: 8620 - RNA, 20 nt, synthetic construct
  misc_feature 1..20: note = spacer sequence
  source 1..20: mol_type = other RNA
aaagtatgttcacagacaat

SEQ ID NO: 8621 - RNA, 20 nt, synthetic construct
  misc_feature 1..20: note = spacer sequence
  source 1..20: mol_type = other RNA
cagacaatttagtgtacctg

SEQ ID NO: 8622 - RNA, 20 nt, synthetic construct
  misc_feature 1..20: note = spacer sequence
  source 1..20: mol_type = other RNA
gtgaacatactttagagcct

SEQ ID NO: 8623 - RNA, 20 nt, synthetic construct
  misc_feature 1..20: note = spacer sequence
  source 1..20: mol_type = other RNA
acccaatgcatttaccacca

SEQ ID NO: 8624 - RNA, 20 nt, synthetic construct
  misc_feature 1..20: note = spacer sequence
  source 1..20: mol_type = other RNA
tgggcgcaaaaatggtggag

SEQ ID NO: 8625 - RNA, 20 nt, synthetic construct
  misc_feature 1..20: note = spacer sequence
  source 1..20: mol_type = other RNA
accatttttgcgcccaggat

SEQ ID NO: 8626 - RNA, 20 nt, synthetic construct
  misc_feature 1..20: note = spacer sequence
  source 1..20: mol_type = other RNA
tccaccatttttgcgcccag

SEQ ID NO: 8627 - RNA, 20 nt, synthetic construct
  misc_feature 1..20: note = spacer sequence
  source 1..20: mol_type = other RNA
tcctccaccatttttgcgcc

SEQ ID NO: 8628 - RNA, 20 nt, synthetic construct
  misc_feature 1..20: note = spacer sequence
  source 1..20: mol_type = other RNA
ccctcctcctccaccatttt

SEQ ID NO: 8629 - RNA, 20 nt, synthetic construct
  misc_feature 1..20: note = spacer sequence
  source 1..20: mol_type = other RNA
tccccctcctcctccaccat

SEQ ID NO: 8630 - RNA, 20 nt, synthetic construct
  misc_feature 1..20: note = spacer sequence
  source 1..20: mol_type = other RNA
tcctccccctcctcctccac

SEQ ID NO: 8631 - RNA, 20 nt, synthetic construct
  misc_feature 1..20: note = spacer sequence
  source 1..20: mol_type = other RNA
tggtgttcctcctccccctc

SEQ ID NO: 8632 - RNA, 20 nt, synthetic construct
  misc_feature 1..20: note = spacer sequence
  source 1..20: mol_type = other RNA
aggctttggtcctggtgttc

SEQ ID NO: 8633 - RNA, 20 nt, synthetic construct
  misc_feature 1..20: note = spacer sequence
  source 1..20: mol_type = other RNA
cagaggaggcgtgaaagcag

SEQ ID NO: 8634 - RNA, 20 nt, synthetic construct
  misc_feature 1..20: note = spacer sequence
  source 1..20: mol_type = other RNA
gggaataccgcctccaggct

SEQ ID NO: 8635 - RNA, 20 nt, synthetic construct
  misc_feature 1..20: note = spacer sequence
  source 1..20: mol_type = other RNA
tctgggaataccgcctccag

SEQ ID NO: 8636 - RNA, 20 nt, synthetic construct
  misc_feature 1..20: note = spacer sequence
  source 1..20: mol_type = other RNA
cgcctcctctgggaataccg

SEQ ID NO: 8637 - RNA, 20 nt, synthetic construct
  misc_feature 1..20: note = spacer sequence
  source 1..20: mol_type = other RNA
agccgcctgctttcacgcct

SEQ ID NO: 8638 - RNA, 20 nt, synthetic construct
  misc_feature 1..20: note = spacer sequence
  source 1..20: mol_type = other RNA
ccagccgcctgctttcacgc

SEQ ID NO: 8639 - RNA, 20 nt, synthetic construct
  misc_feature 1..20: note = spacer sequence
  source 1..20: mol_type = other RNA
acctgtagttggtgctctcc

SEQ ID NO: 8640 - RNA, 20 nt, synthetic construct
  misc_feature 1..20: note = spacer sequence
  source 1..20: mol_type = other RNA
accgggtccacctgtagttg

SEQ ID NO: 8641 - RNA, 20 nt, synthetic construct
  misc_feature 1..20: note = spacer sequence
  source 1..20: mol_type = other RNA
caccacatcaaccgggtcca

SEQ ID NO: 8642 - RNA, 20 nt, synthetic construct
  misc_feature 1..20: note = spacer sequence
  source 1..20: mol_type = other RNA
aggtcccaccacatcaaccg

SEQ ID NO: 8643 - RNA, 20 nt, synthetic construct
  misc_feature 1..20: note = spacer sequence
  source 1..20: mol_type = other RNA
ttctaggtcccaccacatca

SEQ ID NO: 8644 - RNA, 20 nt, synthetic construct
  misc_feature 1..20: note = spacer sequence
  source 1..20: mol_type = other RNA
ttctttctaggtcccaccac

SEQ ID NO: 8645 - RNA, 20 nt, synthetic construct
  misc_feature 1..20: note = spacer sequence
  source 1..20: mol_type = other RNA
tttatctttctttctaggtc

SEQ ID NO: 8646 - RNA, 20 nt, synthetic construct
  misc_feature 1..20: note = spacer sequence
  source 1..20: mol_type = other RNA
agacaccctcccatccacac

SEQ ID NO: 8647 - RNA, 20 nt, synthetic construct
  misc_feature 1..20: note = spacer sequence
  source 1..20: mol_type = other RNA
agataggtggtttattcttt

SEQ ID NO: 8648 - RNA, 20 nt, synthetic construct
  misc_feature 1..20: note = spacer sequence
  source 1..20: mol_type = other RNA
catccacacagtaagcacag

SEQ ID NO: 8649 - RNA, 20 nt, synthetic construct
  misc_feature 1..20: note = spacer sequence
  source 1..20: mol_type = other RNA
acacagtaagcacagataaa

SEQ ID NO: 8650 - RNA, 20 nt, synthetic construct
  misc_feature 1..20: note = spacer sequence
  source 1..20: mol_type = other RNA
gtgcttactgtgtggatggg

SEQ ID NO: 8651 - RNA, 20 nt, synthetic construct
  misc_feature 1..20: note = spacer sequence
  source 1..20: mol_type = other RNA
tttatctgtgcttactgtgt

SEQ ID NO: 8652 - RNA, 20 nt, synthetic construct
  misc_feature 1..20: note = spacer sequence
  source 1..20: mol_type = other RNA
acagtttgctcttttatctg

SEQ ID NO: 8653 - RNA, 20 nt, synthetic construct
  misc_feature 1..20: note = spacer sequence
  source 1..20: mol_type = other RNA
attttttcaacagtttgctc

SEQ ID NO: 8654 - RNA, 20 nt, synthetic construct
  misc_feature 1..20: note = spacer sequence
  source 1..20: mol_type = other RNA
taatttgtgcttattagacc

SEQ ID NO: 8655 - RNA, 20 nt, synthetic construct
  misc_feature 1..20: note = spacer sequence
  source 1..20: mol_type = other RNA
aataagcacaaattaagaaa

SEQ ID NO: 8656 - RNA, 20 nt, synthetic construct
  misc_feature 1..20: note = spacer sequence
  source 1..20: mol_type = other RNA
attcataccaactgatagaa

SEQ ID NO: 8657 - RNA, 20 nt, synthetic construct
  misc_feature 1..20: note = spacer sequence
  source 1..20: mol_type = other RNA
taccaactgatagaaatcaa

SEQ ID NO: 8658 - RNA, 20 nt, synthetic construct
  misc_feature 1..20: note = spacer sequence
  source 1..20: mol_type = other RNA
gttggtatgaatagaagtta

SEQ ID NO: 8659 - RNA, 20 nt, synthetic construct
  misc_feature 1..20: note = spacer sequence
  source 1..20: mol_type = other RNA
atcagttggtatgaatagaa

SEQ ID NO: 8660 - RNA, 20 nt, synthetic construct
  misc_feature 1..20: note = spacer sequence
  source 1..20: mol_type = other RNA
aagctgtgggccgggtgtgg

SEQ ID NO: 8661 - RNA, 20 nt, synthetic construct
  misc_feature 1..20: note = spacer sequence
  source 1..20: mol_type = other RNA
cacctgtaatcccagcattt

SEQ ID NO: 8662 - RNA, 20 nt, synthetic construct
  misc_feature 1..20: note = spacer sequence
  source 1..20: mol_type = other RNA
cagcattttgggaggccgag

SEQ ID NO: 8663 - RNA, 20 nt, synthetic construct
  misc_feature 1..20: note = spacer sequence
  source 1..20: mol_type = other RNA
caaaatgctgggattacagg

SEQ ID NO: 8664 - RNA, 20 nt, synthetic construct
  misc_feature 1..20: note = spacer sequence
  source 1..20: mol_type = other RNA
gcctcccaaaatgctgggat

SEQ ID NO: 8665 - RNA, 20 nt, synthetic construct
  misc_feature 1..20: note = spacer sequence
  source 1..20: mol_type = other RNA
gcctgcctcggcctcccaaa

SEQ ID NO: 8666 - RNA, 20 nt, synthetic construct
  misc_feature 1..20: note = spacer sequence
  source 1..20: mol_type = other RNA
cctaaggtcaggagttcaag

SEQ ID NO: 8667 - RNA, 20 nt, synthetic construct
  misc_feature 1..20: note = spacer sequence
  source 1..20: mol_type = other RNA
ggagttcaagaccagcctgg

SEQ ID NO: 8668 - RNA, 20 nt, synthetic construct
  misc_feature 1..20: note = spacer sequence
  source 1..20: mol_type = other RNA
tgaccttaggtgatccgcct

SEQ ID NO: 8669 - RNA, 20 nt, synthetic construct
  misc_feature 1..20: note = spacer sequence
  source 1..20: mol_type = other RNA
agaccagcctggtcaacatg

SEQ ID NO: 8670 - RNA, 20 nt, synthetic construct
  misc_feature 1..20: note = spacer sequence
  source 1..20: mol_type = other RNA
tgaactcctgaccttaggtg

SEQ ID NO: 8671 - RNA, 20 nt, synthetic construct
  misc_feature 1..20: note = spacer sequence
  source 1..20: mol_type = other RNA
acatggcgaaaccctgtctg

SEQ ID NO: 8672 - RNA, 20 nt, synthetic construct
  misc_feature 1..20: note = spacer sequence
  source 1..20: mol_type = other RNA
ccatgttgaccaggctggtc

SEQ ID NO: 8673 - RNA, 20 nt, synthetic construct
  misc_feature 1..20: note = spacer sequence
  source 1..20: mol_type = other RNA
gtactaaaaatacaaaaatt

SEQ ID NO: 8674 - RNA, 20 nt, synthetic construct
  misc_feature 1..20: note = spacer sequence
  source 1..20: mol_type = other RNA
cagctactccggaggctgag

SEQ ID NO: 8675 - RNA, 20 nt, synthetic construct
  misc_feature 1..20: note = spacer sequence
  source 1..20: mol_type = other RNA
ggaggctgaggcaggagaat

SEQ ID NO: 8676 - RNA, 20 nt, synthetic construct
  misc_feature 1..20: note = spacer sequence
  source 1..20: mol_type = other RNA
ggagtagctgggattacagg

SEQ ID NO: 8677 - RNA, 20 nt, synthetic construct
  misc_feature 1..20: note = spacer sequence
  source 1..20: mol_type = other RNA
gcctccggagtagctgggat

SEQ ID NO: 8678 - RNA, 20 nt, synthetic construct
  misc_feature 1..20: note = spacer sequence
  source 1..20: mol_type = other RNA
tgcctcagcctccggagtag

SEQ ID NO: 8679 - RNA, 20 nt, synthetic construct
  misc_feature 1..20: note = spacer sequence
  source 1..20: mol_type = other RNA
cctgcctcagcctccggagt

SEQ ID NO: 8680 - RNA, 20 nt, synthetic construct
  misc_feature 1..20: note = spacer sequence
  source 1..20: mol_type = other RNA
agcaattctcctgcctcagc

SEQ ID NO: 8681 - RNA, 20 nt, synthetic construct
  misc_feature 1..20: note = spacer sequence
  source 1..20: mol_type = other RNA
ggaggtggaggttgcagtga

SEQ ID NO: 8682 - RNA, 20 nt, synthetic construct
  misc_feature 1..20: note = spacer sequence
  source 1..20: mol_type = other RNA
cgagttcaagcaattctcct

SEQ ID NO: 8683 - RNA, 20 nt, synthetic construct
  misc_feature 1..20: note = spacer sequence
  source 1..20: mol_type = other RNA
acctcccgagttcaagcaat

SEQ ID NO: 8684 - RNA, 20 nt, synthetic construct
  misc_feature 1..20: note = spacer sequence
  source 1..20: mol_type = other RNA
ctgcaacctccacctcccga

SEQ ID NO: 8685 - RNA, 20 nt, synthetic construct
  misc_feature 1..20: note = spacer sequence
  source 1..20: mol_type = other RNA
gctcactgcaacctccacct

SEQ ID NO: 8686 - RNA, 20 nt, synthetic construct
  misc_feature 1..20: note = spacer sequence
  source 1..20: mol_type = other RNA
cggctcactgcaacctccac

SEQ ID NO: 8687 - RNA, 20 nt, synthetic construct
  misc_feature 1..20: note = spacer sequence
  source 1..20: mol_type = other RNA
agcctgggcgacagagcaag

SEQ ID NO: 8688 - RNA, 20 nt, synthetic construct
  misc_feature 1..20: note = spacer sequence
  source 1..20: mol_type = other RNA
cccaggctggagtgcagtgg

SEQ ID NO: 8689 - RNA, 20 nt, synthetic construct
  misc_feature 1..20: note = spacer sequence
  source 1..20: mol_type = other RNA
gtcgcccaggctggagtgca

SEQ ID NO: 8690 - RNA, 20 nt, synthetic construct
  misc_feature 1..20: note = spacer sequence
  source 1..20: mol_type = other RNA
tgctctgtcgcccaggctgg

SEQ ID NO: 8691 - RNA, 20 nt, synthetic construct
  misc_feature 1..20: note = spacer sequence
  source 1..20: mol_type = other RNA
tcaaaaaaaaaaaaagaaaa

SEQ ID NO: 8692 - RNA, 20 nt, synthetic construct
  misc_feature 1..20: note = spacer sequence
  source 1..20: mol_type = other RNA
aaaaaaaaaaaagaaaaaaa

SEQ ID NO: 8693 - RNA, 20 nt, synthetic construct
  misc_feature 1..20: note = spacer sequence
  source 1..20: mol_type = other RNA
ttttttttttttgaagacca

SEQ ID NO: 8694 - RNA, 20 nt, synthetic construct
  misc_feature 1..20: note = spacer sequence
  source 1..20: mol_type = other RNA
ttttttttttttttcttttt

SEQ ID NO: 8695 - RNA, 20 nt, synthetic construct
  misc_feature 1..20: note = spacer sequence
  source 1..20: mol_type = other RNA
ttccttttttttttttttct

SEQ ID NO: 8696 - RNA, 20 nt, synthetic construct
  misc_feature 1..20: note = spacer sequence
  source 1..20: mol_type = other RNA
ttctttcctttttttttttt

SEQ ID NO: 8697 - RNA, 20 nt, synthetic construct
  misc_feature 1..20: note = spacer sequence
  source 1..20: mol_type = other RNA
ttctttctttcctttttttt

SEQ ID NO: 8698 - RNA, 20 nt, synthetic construct
  misc_feature 1..20: note = spacer sequence
  source 1..20: mol_type = other RNA
aagttgcgctcttcacttta

SEQ ID NO: 8699 - RNA, 20 nt, synthetic construct
  misc_feature 1..20: note = spacer sequence
  source 1..20: mol_type = other RNA
tcactttatgacagcaattt

SEQ ID NO: 8700 - RNA, 20 nt, synthetic construct
  misc_feature 1..20: note = spacer sequence
  source 1..20: mol_type = other RNA
ctttatgacagcaatttcac

SEQ ID NO: 8701 - RNA, 20 nt, synthetic construct
  misc_feature 1..20: note = spacer sequence
  source 1..20: mol_type = other RNA
taaagtgaagagcgcaactt

SEQ ID NO: 8702 - RNA, 20 nt, synthetic construct
  misc_feature 1..20: note = spacer sequence
  source 1..20: mol_type = other RNA
cactatatttcaccagtgtt

SEQ ID NO: 8703 - RNA, 20 nt, synthetic construct
  misc_feature 1..20: note = spacer sequence
  source 1..20: mol_type = other RNA
ccagtgtttattggtgttct

SEQ ID NO: 8704 - RNA, 20 nt, synthetic construct
  misc_feature 1..20: note = spacer sequence
  source 1..20: mol_type = other RNA
gacatcatgtaatacatttt

SEQ ID NO: 8705 - RNA, 20 nt, synthetic construct
  misc_feature 1..20: note = spacer sequence
  source 1..20: mol_type = other RNA
gaacaccaataaacactggt

SEQ ID NO: 8706 - RNA, 20 nt, synthetic construct
  misc_feature 1..20: note = spacer sequence
  source 1..20: mol_type = other RNA
tgtaatacattttaaaatgt

SEQ ID NO: 8707 - RNA, 20 nt, synthetic construct
  misc_feature 1..20: note = spacer sequence
  source 1..20: mol_type = other RNA
atggtcctttcagcaacaca

SEQ ID NO: 8708 - RNA, 20 nt, synthetic construct
  misc_feature 1..20: note = spacer sequence
  source 1..20: mol_type = other RNA
tttcagcaacacagctttaa

SEQ ID NO: 8709 - RNA, 20 nt, synthetic construct
  misc_feature 1..20: note = spacer sequence
  source 1..20: mol_type = other RNA
gcaacacagctttaagacag

SEQ ID NO: 8710 - RNA, 20 nt, synthetic construct
  misc_feature 1..20: note = spacer sequence
  source 1..20: mol_type = other RNA
taaagctgtgttgctgaaag

SEQ ID NO: 8711 - RNA, 20 nt, synthetic construct
  misc_feature 1..20: note = spacer sequence
  source 1..20: mol_type = other RNA
tagccattgtgtaaattgcc

SEQ ID NO: 8712 - RNA, 20 nt, synthetic construct
  misc_feature 1..20: note = spacer sequence
  source 1..20: mol_type = other RNA
caggtcctggagccaaactg

SEQ ID NO: 8713 - RNA, 20 nt, synthetic construct
  misc_feature 1..20: note = spacer sequence
  source 1..20: mol_type = other RNA
tggagccaaactgtctgctt

SEQ ID NO: 8714 - RNA, 20 nt, synthetic construct
  misc_feature 1..20: note = spacer sequence
  source 1..20: mol_type = other RNA
aggacctgtgatcttagcca

SEQ ID NO: 8715 - RNA, 20 nt, synthetic construct
  misc_feature 1..20: note = spacer sequence
  source 1..20: mol_type = other RNA
gcttctcccacccgctttag

SEQ ID NO: 8716 - RNA, 20 nt, synthetic construct
  misc_feature 1..20: note = spacer sequence
  source 1..20: mol_type = other RNA
cccacccgctttagttagct

SEQ ID NO: 8717 - RNA, 20 nt, synthetic construct
  misc_feature 1..20: note = spacer sequence
  source 1..20: mol_type = other RNA
cacccgctttagttagctgt

SEQ ID NO: 8718 - RNA, 20 nt, synthetic construct
  misc_feature 1..20: note = spacer sequence
  source 1..20: mol_type = other RNA
cacagctaactaaagcgggt

SEQ ID NO: 8719 - RNA, 20 nt, synthetic construct
  misc_feature 1..20: note = spacer sequence
  source 1..20: mol_type = other RNA
aggtcacacagctaactaaa

SEQ ID NO: 8720 - RNA, 20 nt, synthetic construct
  misc_feature 1..20: note = spacer sequence
  source 1..20: mol_type = other RNA
ctaaaacggcaaagtgccaa

SEQ ID NO: 8721 - RNA, 20 nt, synthetic construct
  misc_feature 1..20: note = spacer sequence
  source 1..20: mol_type = other RNA
aaaacggcaaagtgccaacc

SEQ ID NO: 8722 - RNA, 20 nt, synthetic construct
  misc_feature 1..20: note = spacer sequence
  source 1..20: mol_type = other RNA
gcataattatgtgtggttgg

SEQ ID NO: 8723 - RNA, 20 nt, synthetic construct
  misc_feature 1..20: note = spacer sequence
  source 1..20: mol_type = other RNA
tttaatctgcataattatgt

SEQ ID NO: 8724 - RNA, 20 nt, synthetic construct
  misc_feature 1..20: note = spacer sequence
  source 1..20: mol_type = other RNA
taaaaaaaaaaatagctaac

SEQ ID NO: 8725 - RNA, 20 nt, synthetic construct
  misc_feature 1..20: note = spacer sequence
  source 1..20: mol_type = other RNA
gtggctgggggggttgttaa

SEQ ID NO: 8726 - RNA, 20 nt, synthetic construct
  misc_feature 1..20: note = spacer sequence
  source 1..20: mol_type = other RNA
atggcctgttaggaaacggg

SEQ ID NO: 8727 - RNA, 20 nt, synthetic construct
  misc_feature 1..20: note = spacer sequence
  source 1..20: mol_type = other RNA
taacaggccatagactggta

SEQ ID NO: 8728 - RNA, 20 nt, synthetic construct
  misc_feature 1..20: note = spacer sequence
  source 1..20: mol_type = other RNA
tgagctctgccttctgtcag

SEQ ID NO: 8729 - RNA, 20 nt, synthetic construct
  misc_feature 1..20: note = spacer sequence
  source 1..20: mol_type = other RNA
ggaggtggtgcttgcttgcc

SEQ ID NO: 8730 - RNA, 20 nt, synthetic construct
  misc_feature 1..20: note = spacer sequence
  source 1..20: mol_type = other RNA
gccttctgtcagatcagcgg

SEQ ID NO: 8731 - RNA, 20 nt, synthetic construct
  misc_feature 1..20: note = spacer sequence
  source 1..20: mol_type = other RNA
gtcagatcagcggcagcatt

SEQ ID NO: 8732 - RNA, 20 nt, synthetic construct
  misc_feature 1..20: note = spacer sequence
  source 1..20: mol_type = other RNA
gatcagcggcagcattagat

SEQ ID NO: 8733 - RNA, 20 nt, synthetic construct
  misc_feature 1..20: note = spacer sequence
  source 1..20: mol_type = other RNA
gacagaaggcagagctcagg

SEQ ID NO: 8734 - RNA, 20 nt, synthetic construct
  misc_feature 1..20: note = spacer sequence
  source 1..20: mol_type = other RNA
gcggcagcattagattgtca

SEQ ID NO: 8735 - RNA, 20 nt, synthetic construct
  misc_feature 1..20: note = spacer sequence
  source 1..20: mol_type = other RNA
aatgctgccgctgatctgac

SEQ ID NO: 8736 - RNA, 20 nt, synthetic construct
  misc_feature 1..20: note = spacer sequence
  source 1..20: mol_type = other RNA
taggagcatgaaccctgtcg

SEQ ID NO: 8737 - RNA, 20 nt, synthetic construct
  misc_feature 1..20: note = spacer sequence
  source 1..20: mol_type = other RNA
tatgacaatctaatgctgcc

SEQ ID NO: 8738 - RNA, 20 nt, synthetic construct
  misc_feature 1..20: note = spacer sequence
  source 1..20: mol_type = other RNA
tgctcctatgacaatctaat

SEQ ID NO: 8739 - RNA, 20 nt, synthetic construct
  misc_feature 1..20: note = spacer sequence
  source 1..20: mol_type = other RNA
tgaaatgcacatgtcaggga

SEQ ID NO: 8740 - RNA, 20 nt, synthetic construct
  misc_feature 1..20: note = spacer sequence
  source 1..20: mol_type = other RNA
cgacagggttcatgctccta

SEQ ID NO: 8741 - RNA, 20 nt, synthetic construct
  misc_feature 1..20: note = spacer sequence
  source 1..20: mol_type = other RNA
gggatctagcttgtgcagtt

SEQ ID NO: 8742 - RNA, 20 nt, synthetic construct
  misc_feature 1..20: note = spacer sequence
  source 1..20: mol_type = other RNA
ctgacatgtgcatttcacga

SEQ ID NO: 8743 - RNA, 20 nt, synthetic construct
  misc_feature 1..20: note = spacer sequence
  source 1..20: mol_type = other RNA
agcttgtgcagttcttatga

SEQ ID NO: 8744 - RNA, 20 nt, synthetic construct
  misc_feature 1..20: note = spacer sequence
  source 1..20: mol_type = other RNA
tatgagaatctaactaatgc

SEQ ID NO: 8745 - RNA, 20 nt, synthetic construct
  misc_feature 1..20: note = spacer sequence
  source 1..20: mol_type = other RNA
taagaactgcacaagctaga

SEQ ID NO: 8746 - RNA, 20 nt, synthetic construct
  misc_feature 1..20: note = spacer sequence
  source 1..20: mol_type = other RNA
cataagaactgcacaagcta

SEQ ID NO: 8747 - RNA, 20 nt, synthetic construct
  misc_feature 1..20: note = spacer sequence
  source 1..20: mol_type = other RNA
aactaatgcctgatgatctg

SEQ ID NO: 8748 - RNA, 20 nt, synthetic construct
  misc_feature 1..20: note = spacer sequence
  source 1..20: mol_type = other RNA
ggcattagttagattctcat

SEQ ID NO: 8749 - RNA, 20 nt, synthetic construct
  misc_feature 1..20: note = spacer sequence
  source 1..20: mol_type = other RNA
tcaggcattagttagattct

SEQ ID NO: 8750 - RNA, 20 nt, synthetic construct
  misc_feature 1..20: note = spacer sequence
  source 1..20: mol_type = other RNA
gaggtggagcagctttatcc

SEQ ID NO: 8751 - RNA, 20 nt, synthetic construct
  misc_feature 1..20: note = spacer sequence
  source 1..20: mol_type = other RNA
gatcatcaggcattagttag

SEQ ID NO: 8752 - RNA, 20 nt, synthetic construct
  misc_feature 1..20: note = spacer sequence
  source 1..20: mol_type = other RNA
acctcagatcatcaggcatt

SEQ ID NO: 8753 - RNA, 20 nt, synthetic construct
  misc_feature 1..20: note = spacer sequence
  source 1..20: mol_type = other RNA
tgaaaccatcttccactcca

SEQ ID NO: 8754 - RNA, 20 nt, synthetic construct
  misc_feature 1..20: note = spacer sequence
  source 1..20: mol_type = other RNA
ggataaagctgctccacctc

SEQ ID NO: 8755 - RNA, 20 nt, synthetic construct
  misc_feature 1..20: note = spacer sequence
  source 1..20: mol_type = other RNA
tccactccagtccatggaaa

SEQ ID NO: 8756 - RNA, 20 nt, synthetic construct
  misc_feature 1..20: note = spacer sequence
  source 1..20: mol_type = other RNA
actccagtccatggaaaaat

SEQ ID NO: 8757 - RNA, 20 nt, synthetic construct
  misc_feature 1..20: note = spacer sequence
  source 1..20: mol_type = other RNA
agtccatggaaaaattgcct

SEQ ID NO: 8758 - RNA, 20 nt, synthetic construct
  misc_feature 1..20: note = spacer sequence
  source 1..20: mol_type = other RNA
atggaaaaattgccttccaa

SEQ ID NO: 8759 - RNA, 20 nt, synthetic construct
  misc_feature 1..20: note = spacer sequence
  source 1..20: mol_type = other RNA
atggactggagtggaagatg

SEQ ID NO: 8760 - RNA, 20 nt, synthetic construct
  misc_feature 1..20: note = spacer sequence
  source 1..20: mol_type = other RNA
aagaaactggtccctggtgc

SEQ ID NO: 8761 - RNA, 20 nt, synthetic construct
  misc_feature 1..20: note = spacer sequence
  source 1..20: mol_type = other RNA
tggaaggcaatttttccatg

SEQ ID NO: 8762 - RNA, 20 nt, synthetic construct
  misc_feature 1..20: note = spacer sequence
  source 1..20: mol_type = other RNA
ctggtgccggaaaggttgga

SEQ ID NO: 8763 - RNA, 20 nt, synthetic construct
  misc_feature 1..20: note = spacer sequence
  source 1..20: mol_type = other RNA
ggcaccagggaccagtttct

SEQ ID NO: 8764 - RNA, 20 nt, synthetic construct
  misc_feature 1..20: note = spacer sequence
  source 1..20: mol_type = other RNA
aacctttccggcaccaggga

SEQ ID NO: 8765 - RNA, 20 nt, synthetic construct
  misc_feature 1..20: note = spacer sequence
  source 1..20: mol_type = other RNA
ccaacctttccggcaccagg

SEQ ID NO: 8766 - RNA, 20 nt, synthetic construct
  misc_feature 1..20: note = spacer sequence
  source 1..20: mol_type = other RNA
gaacagatcaggcagctttc

SEQ ID NO: 8767 - RNA, 20 nt, synthetic construct
  misc_feature 1..20: note = spacer sequence
  source 1..20: mol_type = other RNA
gatagtggtctccaaccttt

SEQ ID NO: 8768 - RNA, 20 nt, synthetic construct
  misc_feature 1..20: note = spacer sequence
  source 1..20: mol_type = other RNA
gttcagatagtggtctccaa

SEQ ID NO: 8769 - RNA, 20 nt, synthetic construct
  misc_feature 1..20: note = spacer sequence
  source 1..20: mol_type = other RNA
ggcagctttctgtaaatgag

SEQ ID NO: 8770 - RNA, 20 nt, synthetic construct
  misc_feature 1..20: note = spacer sequence
  source 1..20: mol_type = other RNA
gtaaatgagtgctgacacac

SEQ ID NO: 8771 - RNA, 20 nt, synthetic construct
  misc_feature 1..20: note = spacer sequence
  source 1..20: mol_type = other RNA
tttacagaaagctgcctgat

SEQ ID NO: 8772 - RNA, 20 nt, synthetic construct
  misc_feature 1..20: note = spacer sequence
  source 1..20: mol_type = other RNA
gcactcatttacagaaagct

SEQ ID NO: 8773 - RNA, 20 nt, synthetic construct
  misc_feature 1..20: note = spacer sequence
  source 1..20: mol_type = other RNA
atgtgtgtcagcactcattt

SEQ ID NO: 8774 - RNA, 20 nt, synthetic construct
  misc_feature 1..20: note = spacer sequence
  source 1..20: mol_type = other RNA
aagcaaaattcaatgtgtgt

SEQ ID NO: 8775 - RNA, 20 nt, synthetic construct
  misc_feature 1..20: note = spacer sequence
  source 1..20: mol_type = other RNA
agtgcaggttctaagcaaaa

SEQ ID NO: 8776 - RNA, 20 nt, synthetic construct
  misc_feature 1..20: note = spacer sequence
  source 1..20: mol_type = other RNA
agaaggtcagctgaagagtt

SEQ ID NO: 8777 - RNA, 20 nt, synthetic construct
  misc_feature 1..20: note = spacer sequence
  source 1..20: mol_type = other RNA
ggatatgcccctccagtgca

SEQ ID NO: 8778 - RNA, 20 nt, synthetic construct
  misc_feature 1..20: note = spacer sequence
  source 1..20: mol_type = other RNA
gctgaagagtttgccaacta

SEQ ID NO: 8779 - RNA, 20 nt, synthetic construct
  misc_feature 1..20: note = spacer sequence
  source 1..20: mol_type = other RNA
gctgaccttctggatatgcc

SEQ ID NO: 8780 - RNA, 20 nt, synthetic construct
  misc_feature 1..20: note = spacer sequence
  source 1..20: mol_type = other RNA
tcagctgaccttctggatat

SEQ ID NO: 8781 - RNA, 20 nt, synthetic construct
  misc_feature 1..20: note = spacer sequence
  source 1..20: mol_type = other RNA
cctagttggcaaactcttca

SEQ ID NO: 8782 - RNA, 20 nt, synthetic construct
  misc_feature 1..20: note = spacer sequence
  source 1..20: mol_type = other RNA
atttaaatcacagccaagaa

SEQ ID NO: 8783 - RNA, 20 nt, synthetic construct
  misc_feature 1..20: note = spacer sequence
  source 1..20: mol_type = other RNA
cagccaagaatgtaccaaag

SEQ ID NO: 8784 - RNA, 20 nt, synthetic construct
  misc_feature 1..20: note = spacer sequence
  source 1..20: mol_type = other RNA
tggctgtgatttaaatggac

SEQ ID NO: 8785 - RNA, 20 nt, synthetic construct
  misc_feature 1..20: note = spacer sequence
  source 1..20: mol_type = other RNA
cctcacattgagaaaatgaa

SEQ ID NO: 8786 - RNA, 20 nt, synthetic construct
  misc_feature 1..20: note = spacer sequence
  source 1..20: mol_type = other RNA
cattgagaaaatgaagacac

SEQ ID NO: 8787 - RNA, 20 nt, synthetic construct
  misc_feature 1..20: note = spacer sequence
  source 1..20: mol_type = other RNA
atgtgaggggaaaactgtat

SEQ ID NO: 8788 - RNA, 20 nt, synthetic construct
  misc_feature 1..20: note = spacer sequence
  source 1..20: mol_type = other RNA
caatgtgaggggaaaactgt

SEQ ID NO: 8789 - RNA, 20 nt, synthetic construct
  misc_feature 1..20: note = spacer sequence
  source 1..20: mol_type = other RNA
ttttctcaatgtgaggggaa

SEQ ID NO: 8790 - RNA, 20 nt, synthetic construct
  misc_feature 1..20: note = spacer sequence
  source 1..20: mol_type = other RNA
tcattttctcaatgtgaggg

SEQ ID NO: 8791 - RNA, 20 nt, synthetic construct
  misc_feature 1..20: note = spacer sequence
  source 1..20: mol_type = other RNA
ctttcatgatagctcagatt

SEQ ID NO: 8792 - RNA, 20 nt, synthetic construct
  misc_feature 1..20: note = spacer sequence
  source 1..20: mol_type = other RNA
tgatagctcagatttatctg

SEQ ID NO: 8793 - RNA, 20 nt, synthetic construct
  misc_feature 1..20: note = spacer sequence
  source 1..20: mol_type = other RNA
tgaaagtgaattgtgtcttc

SEQ ID NO: 8794 - RNA, 20 nt, synthetic construct
  misc_feature 1..20: note = spacer sequence
  source 1..20: mol_type = other RNA
gatttatctgattcagattt

SEQ ID NO: 8795 - RNA, 20 nt, synthetic construct
  misc_feature 1..20: note = spacer sequence
  source 1..20: mol_type = other RNA
gagctatcatgaaagtgaat

SEQ ID NO: 8796 - RNA, 20 nt, synthetic construct
  misc_feature 1..20: note = spacer sequence
  source 1..20: mol_type = other RNA
gattcagatttaatgtgaga

SEQ ID NO: 8797 - RNA, 20 nt, synthetic construct
  misc_feature 1..20: note = spacer sequence
  source 1..20: mol_type = other RNA
gataaatctgagctatcatg

SEQ ID NO: 8798 - RNA, 20 nt, synthetic construct
  misc_feature 1..20: note = spacer sequence
  source 1..20: mol_type = other RNA
gatttaatgtgagaaactga

SEQ ID NO: 8799 - RNA, 20 nt, synthetic construct
  misc_feature 1..20: note = spacer sequence
  source 1..20: mol_type = other RNA
gaatcagataaatctgagct

SEQ ID NO: 8800 - RNA, 20 nt, synthetic construct
  misc_feature 1..20: note = spacer sequence
  source 1..20: mol_type = other RNA
cattaaatctgaatcagata

SEQ ID NO: 8801 - RNA, 20 nt, synthetic construct
  misc_feature 1..20: note = spacer sequence
  source 1..20: mol_type = other RNA
cacattaaatctgaatcaga

SEQ ID NO: 8802 - RNA, 20 nt, synthetic construct
  misc_feature 1..20: note = spacer sequence
  source 1..20: mol_type = other RNA
gtttctcacattaaatctga

SEQ ID NO: 8803 - RNA, 20 nt, synthetic construct
  misc_feature 1..20: note = spacer sequence
  source 1..20: mol_type = other RNA
tcagtttctcacattaaatc

SEQ ID NO: 8804 - RNA, 20 nt, synthetic construct
  misc_feature 1..20: note = spacer sequence
  source 1..20: mol_type = other RNA
ttcctcagtttctcacatta

SEQ ID NO: 8805 - RNA, 20 nt, synthetic construct
  misc_feature 1..20: note = spacer sequence
  source 1..20: mol_type = other RNA
tccttcctcagtttctcaca

SEQ ID NO: 8806 - RNA, 20 nt, synthetic construct
  misc_feature 1..20: note = spacer sequence
  source 1..20: mol_type = other RNA
tgtcttccttcctcagtttc

SEQ ID NO: 8807 - RNA, 20 nt, synthetic construct
  misc_feature 1..20: note = spacer sequence
  source 1..20: mol_type = other RNA
agtagatcacacatagaact

SEQ ID NO: 8808 - RNA, 20 nt, synthetic construct
  misc_feature 1..20: note = spacer sequence
  source 1..20: mol_type = other RNA
actggatttttcttgtcttc

SEQ ID NO: 8809 - RNA, 20 nt, synthetic construct
  misc_feature 1..20: note = spacer sequence
  source 1..20: mol_type = other RNA
cacatagaactatgggtcaa

SEQ ID NO: 8810 - RNA, 20 nt, synthetic construct
  misc_feature 1..20: note = spacer sequence
  source 1..20: mol_type = other RNA
atgtgtgatctactggattt

SEQ ID NO: 8811 - RNA, 20 nt, synthetic construct
  misc_feature 1..20: note = spacer sequence
  source 1..20: mol_type = other RNA
agttcttataattttcaaag

SEQ ID NO: 8812 - RNA, 20 nt, synthetic construct
  misc_feature 1..20: note = spacer sequence
  source 1..20: mol_type = other RNA
tataattttcaaagggtttt

SEQ ID NO: 8813 - RNA, 20 nt, synthetic construct
  misc_feature 1..20: note = spacer sequence
  source 1..20: mol_type = other RNA
aagggtttttcatttttcgg

SEQ ID NO: 8814 - RNA, 20 nt, synthetic construct
  misc_feature 1..20: note = spacer sequence
  source 1..20: mol_type = other RNA
tttttcggcccttatgacgt

SEQ ID NO: 8815 - RNA, 20 nt, synthetic construct
  misc_feature 1..20: note = spacer sequence
  source 1..20: mol_type = other RNA
gcccttatgacgtgacaaaa

SEQ ID NO: 8816 - RNA, 20 nt, synthetic construct
  misc_feature 1..20: note = spacer sequence
  source 1..20: mol_type = other RNA
taagggccgaaaaatgaaaa

SEQ ID NO: 8817 - RNA, 20 nt, synthetic construct
  misc_feature 1..20: note = spacer sequence
  source 1..20: mol_type = other RNA
cgtcataagggccgaaaaat

SEQ ID NO: 8818 - RNA, 20 nt, synthetic construct
  misc_feature 1..20: note = spacer sequence
  source 1..20: mol_type = other RNA
gtatgttttttgtcacgtca

SEQ ID NO: 8819 - RNA, 20 nt, synthetic construct
  misc_feature 1..20: note = spacer sequence
  source 1..20: mol_type = other RNA
catttaaccctcaaaacaac

SEQ ID NO: 8820 - RNA, 20 nt, synthetic construct
  misc_feature 1..20: note = spacer sequence
  source 1..20: mol_type = other RNA
tttaaccctcaaaacaactc

SEQ ID NO: 8821 - RNA, 20 nt, synthetic construct
  misc_feature 1..20: note = spacer sequence
  source 1..20: mol_type = other RNA
aaacaactctaacacatgag

SEQ ID NO: 8822 - RNA, 20 nt, synthetic construct
  misc_feature 1..20: note = spacer sequence
  source 1..20: mol_type = other RNA
aacacatgaggaatgccaaa

SEQ ID NO: 8823 - RNA, 20 nt, synthetic construct
  misc_feature 1..20: note = spacer sequence
  source 1..20: mol_type = other RNA
tgtgttagagttgttttgag

SEQ ID NO: 8824 - RNA, 20 nt, synthetic construct
  misc_feature 1..20: note = spacer sequence
  source 1..20: mol_type = other RNA
tcatgtgttagagttgtttt

SEQ ID NO: 8825 - RNA, 20 nt, synthetic construct
  misc_feature 1..20: note = spacer sequence
  source 1..20: mol_type = other RNA
tggctttggcattcctcatg

SEQ ID NO: 8826 - RNA, 20 nt, synthetic construct
  misc_feature 1..20: note = spacer sequence
  source 1..20: mol_type = other RNA
ctttcctggctttggcattc

SEQ ID NO: 8827 - RNA, 20 nt, synthetic construct
  misc_feature 1..20: note = spacer sequence
  source 1..20: mol_type = other RNA
tatttgtaaatgtgcaaatt

SEQ ID NO: 8828 - RNA, 20 nt, synthetic construct
  misc_feature 1..20: note = spacer sequence
  source 1..20: mol_type = other RNA
gtttcctatttgtaaatgtg

SEQ ID NO: 8829 - RNA, 20 nt, synthetic construct
  misc_feature 1..20: note = spacer sequence
  source 1..20: mol_type = other RNA
cttataagcttcagtttcct

SEQ ID NO: 8830 - RNA, 20 nt, synthetic construct
  misc_feature 1..20: note = spacer sequence
  source 1..20: mol_type = other RNA
gcagtatggtatttggcatg

SEQ ID NO: 8831 - RNA, 20 nt, synthetic construct
  misc_feature 1..20: note = spacer sequence
  source 1..20: mol_type = other RNA
gttgtttatattcagcagta

SEQ ID NO: 8832 - RNA, 20 nt, synthetic construct
  misc_feature 1..20: note = spacer sequence
  source 1..20: mol_type = other RNA
actctgttgtttatattcag

SEQ ID NO: 8833 - RNA, 20 nt, synthetic construct
  misc_feature 1..20: note = spacer sequence
  source 1..20: mol_type = other RNA
caactctgttgtttatattc

SEQ ID NO: 8834 - RNA, 20 nt, synthetic construct
  misc_feature 1..20: note = spacer sequence
  source 1..20: mol_type = other RNA
accagaatctagtattgctt

SEQ ID NO: 8835 - RNA, 20 nt, synthetic construct
  misc_feature 1..20: note = spacer sequence
  source 1..20: mol_type = other RNA
ggtagaactgggtttaattc

SEQ ID NO: 8836 - RNA, 20 nt, synthetic construct
  misc_feature 1..20: note = spacer sequence
  source 1..20: mol_type = other RNA
agtattgcttttcaagtaac

SEQ ID NO: 8837 - RNA, 20 nt, synthetic construct
  misc_feature 1..20: note = spacer sequence
  source 1..20: mol_type = other RNA
agtaacaggttggctgacta

SEQ ID NO: 8838 - RNA, 20 nt, synthetic construct
  misc_feature 1..20: note = spacer sequence
  source 1..20: mol_type = other RNA
gccaacctgttacttgaaaa

SEQ ID NO: 8839 - RNA, 20 nt, synthetic construct
  misc_feature 1..20: note = spacer sequence
  source 1..20: mol_type = other RNA
agtcagccaacctgttactt

SEQ ID NO: 8840 - RNA, 20 nt, synthetic construct
  misc_feature 1..20: note = spacer sequence
  source 1..20: mol_type = other RNA
tattataaaatatttgctgt

SEQ ID NO: 8841 - RNA, 20 nt, synthetic construct
  misc_feature 1..20: note = spacer sequence
  source 1..20: mol_type = other RNA
tcatgttaaatggcatttat

SEQ ID NO: 8842 - RNA, 20 nt, synthetic construct
  misc_feature 1..20: note = spacer sequence
  source 1..20: mol_type = other RNA
tgttaaatggcatttattat

SEQ ID NO: 8843 - RNA, 20 nt, synthetic construct
  misc_feature 1..20: note = spacer sequence
  source 1..20: mol_type = other RNA
taataaatgccatttaacat

SEQ ID NO: 8844 - RNA, 20 nt, synthetic construct
  misc_feature 1..20: note = spacer sequence
  source 1..20: mol_type = other RNA
atccatttaaaaatttcata

SEQ ID NO: 8845 - RNA, 20 nt, synthetic construct
  misc_feature 1..20: note = spacer sequence
  source 1..20: mol_type = other RNA
atttaaaaatttcataagga

SEQ ID NO: 8846 - RNA, 20 nt, synthetic construct
  misc_feature 1..20: note = spacer sequence
  source 1..20: mol_type = other RNA
taaggatagcatccaaggtg

SEQ ID NO: 8847 - RNA, 20 nt, synthetic construct
  misc_feature 1..20: note = spacer sequence
  source 1..20: mol_type = other RNA
ttatgaaatttttaaatgga

SEQ ID NO: 8848 - RNA, 20 nt, synthetic construct
  misc_feature 1..20: note = spacer sequence
  source 1..20: mol_type = other RNA
aaggtgaaaattaagaaaat

SEQ ID NO: 8849 - RNA, 20 nt, synthetic construct
  misc_feature 1..20: note = spacer sequence
  source 1..20: mol_type = other RNA
ccttggatgctatccttatg

SEQ ID NO: 8850 - RNA, 20 nt, synthetic construct
  misc_feature 1..20: note = spacer sequence
  source 1..20: mol_type = other RNA
taattttcaccttggatgct

SEQ ID NO: 8851 - RNA, 20 nt, synthetic construct
  misc_feature 1..20: note = spacer sequence
  source 1..20: mol_type = other RNA
ctgtccctcaaagcagcagc

SEQ ID NO: 8852 - RNA, 20 nt, synthetic construct
  misc_feature 1..20: note = spacer sequence
  source 1..20: mol_type = other RNA
ctcaaagcagcagcttattg

SEQ ID NO: 8853 - RNA, 20 nt, synthetic construct
  misc_feature 1..20: note = spacer sequence
  source 1..20: mol_type = other RNA
aagcagcagcttattgggta

SEQ ID NO: 8854 - RNA, 20 nt, synthetic construct
  misc_feature 1..20: note = spacer sequence
  source 1..20: mol_type = other RNA
aagtttcttcaggacacaaa

SEQ ID NO: 8855 - RNA, 20 nt, synthetic construct
  misc_feature 1..20: note = spacer sequence
  source 1..20: mol_type = other RNA
tcaggacacaaagtccctga

SEQ ID NO: 8856 - RNA, 20 nt, synthetic construct
  misc_feature 1..20: note = spacer sequence
  source 1..20: mol_type = other RNA
ggacacaaagtccctgaaga

SEQ ID NO: 8857 - RNA, 20 nt, synthetic construct
  misc_feature 1..20: note = spacer sequence
  source 1..20: mol_type = other RNA
tgaagaaacttggatatgta

SEQ ID NO: 8858 - RNA, 20 nt, synthetic construct
  misc_feature 1..20: note = spacer sequence
  source 1..20: mol_type = other RNA
ctgaagaatgaagactcaga

SEQ ID NO: 8859 - RNA, 20 nt, synthetic construct
  misc_feature 1..20: note = spacer sequence
  source 1..20: mol_type = other RNA
gggactttgtgtcctgaaga

SEQ ID NO: 8860 - RNA, 20 nt, synthetic construct
  misc_feature 1..20: note = spacer sequence
  source 1..20: mol_type = other RNA
tcagggactttgtgtcctga

SEQ ID NO: 8861 - RNA, 20 nt, synthetic construct
  misc_feature 1..20: note = spacer sequence
  source 1..20: mol_type = other RNA
ttcttcagggactttgtgtc

SEQ ID NO: 8862 - RNA, 20 nt, synthetic construct
  misc_feature 1..20: note = spacer sequence
  source 1..20: mol_type = other RNA
tcattcttcagggactttgt

SEQ ID NO: 8863 - RNA, 20 nt, synthetic construct
  misc_feature 1..20: note = spacer sequence
  source 1..20: mol_type = other RNA
gaaaaaaagtaggcagagcc

SEQ ID NO: 8864 - RNA, 20 nt, synthetic construct
  misc_feature 1..20: note = spacer sequence
  source 1..20: mol_type = other RNA
gagtcttcattcttcaggga

SEQ ID NO: 8865 - RNA, 20 nt, synthetic construct
  misc_feature 1..20: note = spacer sequence
  source 1..20: mol_type = other RNA
gcctactttttttctgagtc

SEQ ID NO: 8866 - RNA, 20 nt, synthetic construct
  misc_feature 1..20: note = spacer sequence
  source 1..20: mol_type = other RNA
taggctctgcctactttttt

SEQ ID NO: 8867 - RNA, 20 nt, synthetic construct
  misc_feature 1..20: note = spacer sequence
  source 1..20: mol_type = other RNA
agtttcataggctctgccta

SEQ ID NO: 8868 - RNA, 20 nt, synthetic construct
  misc_feature 1..20: note = spacer sequence
  source 1..20: mol_type = other RNA
gtatcaagtttcataggctc

SEQ ID NO: 8869 - RNA, 20 nt, synthetic construct
  misc_feature 1..20: note = spacer sequence
  source 1..20: mol_type = other RNA
ggatggatagatgtaagaca

SEQ ID NO: 8870 - RNA, 20 nt, synthetic construct
  misc_feature 1..20: note = spacer sequence
  source 1..20: mol_type = other RNA
agattattcagtatcaagtt

SEQ ID NO: 8871 - RNA, 20 nt, synthetic construct
  misc_feature 1..20: note = spacer sequence
  source 1..20: mol_type = other RNA
atccagattattcagtatca

SEQ ID NO: 8872 - RNA, 20 nt, synthetic construct
  misc_feature 1..20: note = spacer sequence
  source 1..20: mol_type = other RNA
atccatccagattattcagt

SEQ ID NO: 8873 - RNA, 20 nt, synthetic construct
  misc_feature 1..20: note = spacer sequence
  source 1..20: mol_type = other RNA
tacatctatccatccagatt

SEQ ID NO: 8874 - RNA, 20 nt, synthetic construct
  misc_feature 1..20: note = spacer sequence
  source 1..20: mol_type = other RNA
cacctgtaatcccagcactt

SEQ ID NO: 8875 - RNA, 20 nt, synthetic construct
  misc_feature 1..20: note = spacer sequence
  source 1..20: mol_type = other RNA
cagcactttgggaggccaag

SEQ ID NO: 8876 - RNA, 20 nt, synthetic construct
  misc_feature 1..20: note = spacer sequence
  source 1..20: mol_type = other RNA
caaagtgctgggattacagg

SEQ ID NO: 8877 - RNA, 20 nt, synthetic construct
  misc_feature 1..20: note = spacer sequence
  source 1..20: mol_type = other RNA
gcctgccttggcctcccaaa

SEQ ID NO: 8878 - RNA, 20 nt, synthetic construct
  misc_feature 1..20: note = spacer sequence
  source 1..20: mol_type = other RNA
cttgaggccaggagtttgat

SEQ ID NO: 8879 - RNA, 20 nt, synthetic construct
  misc_feature 1..20: note = spacer sequence
  source 1..20: mol_type = other RNA
agtgatctgcctgccttggc

SEQ ID NO: 8880 - RNA, 20 nt, synthetic construct
  misc_feature 1..20: note = spacer sequence
  source 1..20: mol_type = other RNA
tggcctcaagtgatctgcct

SEQ ID NO: 8881 - RNA, 20 nt, synthetic construct
  misc_feature 1..20: note = spacer sequence
  source 1..20: mol_type = other RNA
aactcctggcctcaagtgat

SEQ ID NO: 8882 - RNA, 20 nt, synthetic construct
  misc_feature 1..20: note = spacer sequence
  source 1..20: mol_type = other RNA
tatcaaactcctggcctcaa

SEQ ID NO: 8883 - RNA, 20 nt, synthetic construct
  misc_feature 1..20: note = spacer sequence
  source 1..20: mol_type = other RNA
ccatgctggccaggctcgta

SEQ ID NO: 8884 - RNA, 20 nt, synthetic construct
  misc_feature 1..20: note = spacer sequence
  source 1..20: mol_type = other RNA
ctactaaaaatacaaaaatt

SEQ ID NO: 8885 - RNA, 20 nt, synthetic construct
  misc_feature 1..20: note = spacer sequence
  source 1..20: mol_type = other RNA
actaaaaatacaaaaattag

SEQ ID NO: 8886 - RNA, 20 nt, synthetic construct
  misc_feature 1..20: note = spacer sequence
  source 1..20: mol_type = other RNA
tgtaatcccagctattcagg

SEQ ID NO: 8887 - RNA, 20 nt, synthetic construct
  misc_feature 1..20: note = spacer sequence
  source 1..20: mol_type = other RNA
cagctattcaggtggctgag

SEQ ID NO: 8888 - RNA, 20 nt, synthetic construct
  misc_feature 1..20: note = spacer sequence
  source 1..20: mol_type = other RNA
ggtggctgaggcaagagggt

SEQ ID NO: 8889 - RNA, 20 nt, synthetic construct
  misc_feature 1..20: note = spacer sequence
  source 1..20: mol_type = other RNA
gccacctgaatagctgggat

SEQ ID NO: 8890 - RNA, 20 nt, synthetic construct
  misc_feature 1..20: note = spacer sequence
  source 1..20: mol_type = other RNA
tgcctcagccacctgaatag

SEQ ID NO: 8891 - RNA, 20 nt, synthetic construct
  misc_feature 1..20: note = spacer sequence
  source 1..20: mol_type = other RNA
gcttgaatctgggaggtgga

SEQ ID NO: 8892 - RNA, 20 nt, synthetic construct
  misc_feature 1..20: note = spacer sequence
  source 1..20: mol_type = other RNA
agccgaccctcttgcctcag

SEQ ID NO: 8893 - RNA, 20 nt, synthetic construct
  misc_feature 1..20: note = spacer sequence
  source 1..20: mol_type = other RNA
gggaggtggaagttgcagtg

SEQ ID NO: 8894 - RNA, 20 nt, synthetic construct
  misc_feature 1..20: note = spacer sequence
  source 1..20: mol_type = other RNA
cagattcaagccgaccctct

SEQ ID NO: 8895 - RNA, 20 nt, synthetic construct
  misc_feature 1..20: note = spacer sequence
  source 1..20: mol_type = other RNA
acctcccagattcaagccga

SEQ ID NO: 8896 - RNA, 20 nt, synthetic construct
  misc_feature 1..20: note = spacer sequence
  source 1..20: mol_type = other RNA
ctgcaacttccacctcccag

SEQ ID NO: 8897 - RNA, 20 nt, synthetic construct
  misc_feature 1..20: note = spacer sequence
  source 1..20: mol_type = other RNA
ccaccacattccagcttggg

SEQ ID NO: 8898 - RNA, 20 nt, synthetic construct
  misc_feature 1..20: note = spacer sequence
  source 1..20: mol_type = other RNA
agcttgggcaacaaagagag

SEQ ID NO: 8899 - RNA, 20 nt, synthetic construct
  misc_feature 1..20: note = spacer sequence
  source 1..20: mol_type = other RNA
ttgttgcccaagctggaatg

SEQ ID NO: 8900 - RNA, 20 nt, synthetic construct
  misc_feature 1..20: note = spacer sequence
  source 1..20: mol_type = other RNA
ctttgttgcccaagctggaa

SEQ ID NO: 8901 - RNA, 20 nt, synthetic construct
  misc_feature 1..20: note = spacer sequence
  source 1..20: mol_type = other RNA
ctctttgttgcccaagctgg

SEQ ID NO: 8902 - RNA, 20 nt, synthetic construct
  misc_feature 1..20: note = spacer sequence
  source 1..20: mol_type = other RNA
gtctcaaaaaaaaaaaaaaa

SEQ ID NO: 8903 - RNA, 20 nt, synthetic construct
  misc_feature 1..20: note = spacer sequence
  source 1..20: mol_type = other RNA
caaaaaaaaaaaaaaaaaaa

SEQ ID NO: 8904 - RNA, 20 nt, synthetic construct
  misc_feature 1..20: note = spacer sequence
  source 1..20: mol_type = other RNA
aaaaaaaaaaaaaaaaaaaa

SEQ ID NO: 8905 - RNA, 20 nt, synthetic construct
  misc_feature 1..20: note = spacer sequence
  source 1..20: mol_type = other RNA
cttttttttttttttttttt

SEQ ID NO: 8906 - RNA, 20 nt, synthetic construct
  misc_feature 1..20: note = spacer sequence
  source 1..20: mol_type = other RNA
tcactttttttttttttttt

SEQ ID NO: 8907 - RNA, 20 nt, synthetic construct
  misc_feature 1..20: note = spacer sequence
  source 1..20: mol_type = other RNA
gataaaacatgaaaaatgta

SEQ ID NO: 8908 - RNA, 20 nt, synthetic construct
  misc_feature 1..20: note = spacer sequence
  source 1..20: mol_type = other RNA
gatttaaattttatattctt

SEQ ID NO: 8909 - RNA, 20 nt, synthetic construct
  misc_feature 1..20: note = spacer sequence
  source 1..20: mol_type = other RNA
tgttttatcagatttaaatt

SEQ ID NO: 8910 - RNA, 20 nt, synthetic construct
  misc_feature 1..20: note = spacer sequence
  source 1..20: mol_type = other RNA
tgttttttactatgaatcca

SEQ ID NO: 8911 - RNA, 20 nt, synthetic construct
  misc_feature 1..20: note = spacer sequence
  source 1..20: mol_type = other RNA
tagtaaaaaacatgagtaca

SEQ ID NO: 8912 - RNA, 20 nt, synthetic construct
  misc_feature 1..20: note = spacer sequence
  source 1..20: mol_type = other RNA
agacatatatctacagtaag

SEQ ID NO: 8913 - RNA, 20 nt, synthetic construct
  misc_feature 1..20: note = spacer sequence
  source 1..20: mol_type = other RNA
ggattcatagtaaaaaacat

SEQ ID NO: 8914 - RNA, 20 nt, synthetic construct
  misc_feature 1..20: note = spacer sequence
  source 1..20: mol_type = other RNA
acagtaagatttagaaaggg

SEQ ID NO: 8915 - RNA, 20 nt, synthetic construct
  misc_feature 1..20: note = spacer sequence
  source 1..20: mol_type = other RNA
tactgtagatatatgtctgg

SEQ ID NO: 8916 - RNA, 20 nt, synthetic construct
  misc_feature 1..20: note = spacer sequence
  source 1..20: mol_type = other RNA
aaatcttactgtagatatat

SEQ ID NO: 8917 - RNA, 20 nt, synthetic construct
  misc_feature 1..20: note = spacer sequence
  source 1..20: mol_type = other RNA
ctttctaaatcttactgtag

SEQ ID NO: 8918 - RNA, 20 nt, synthetic construct
  misc_feature 1..20: note = spacer sequence
  source 1..20: mol_type = other RNA
ggcacttaaagtttaagtca

SEQ ID NO: 8919 - RNA, 20 nt, synthetic construct
  misc_feature 1..20: note = spacer sequence
  source 1..20: mol_type = other RNA
tgtcccaatattctcacctg

SEQ ID NO: 8920 - RNA, 20 nt, synthetic construct
  misc_feature 1..20: note = spacer sequence
  source 1..20: mol_type = other RNA
caatattctcacctgtggag

SEQ ID NO: 8921 - RNA, 20 nt, synthetic construct
  misc_feature 1..20: note = spacer sequence
  source 1..20: mol_type = other RNA
cacctgtggaggtggcactg

SEQ ID NO: 8922 - RNA, 20 nt, synthetic construct
  misc_feature 1..20: note = spacer sequence
  source 1..20: mol_type = other RNA
cctgtggaggtggcactgtt

SEQ ID NO: 8923 - RNA, 20 nt, synthetic construct
  misc_feature 1..20: note = spacer sequence
  source 1..20: mol_type = other RNA
acaggtgagaatattgggac

SEQ ID NO: 8924 - RNA, 20 nt, synthetic construct
  misc_feature 1..20: note = spacer sequence
  source 1..20: mol_type = other RNA
tgcacctataacagtgccac

SEQ ID NO: 8925 - RNA, 20 nt, synthetic construct
  misc_feature 1..20: note = spacer sequence
  source 1..20: mol_type = other RNA
tgttcctgcacctataacag

SEQ ID NO: 8926 - RNA, 20 nt, synthetic construct
  misc_feature 1..20: note = spacer sequence
  source 1..20: mol_type = other RNA
tattcctgttcctgcaccta

SEQ ID NO: 8927 - RNA, 20 nt, synthetic construct
  misc_feature 1..20: note = spacer sequence
  source 1..20: mol_type = other RNA
ctcctattcctgttcctgca

SEQ ID NO: 8928 - RNA, 20 nt, synthetic construct
  misc_feature 1..20: note = spacer sequence
  source 1..20: mol_type = other RNA
cccatacctaaaccattacc

SEQ ID NO: 8929 - RNA, 20 nt, synthetic construct
  misc_feature 1..20: note = spacer sequence
  source 1..20: mol_type = other RNA
gtgtgtgaggtttcagcacc

SEQ ID NO: 8930 - RNA, 20 nt, synthetic construct
  misc_feature 1..20: note = spacer sequence
  source 1..20: mol_type = other RNA
cacacagaaccagtatcacc

SEQ ID NO: 8931 - RNA, 20 nt, synthetic construct
  misc_feature 1..20: note = spacer sequence
  source 1..20: mol_type = other RNA
gcacctccattttgagcaac

SEQ ID NO: 8932 - RNA, 20 nt, synthetic construct
  misc_feature 1..20: note = spacer sequence
  source 1..20: mol_type = other RNA
attttgagcaacttcatttt

SEQ ID NO: 8933 - RNA, 20 nt, synthetic construct
  misc_feature 1..20: note = spacer sequence
  source 1..20: mol_type = other RNA
aaatggaggtgctgaaacct

SEQ ID NO: 8934 - RNA, 20 nt, synthetic construct
  misc_feature 1..20: note = spacer sequence
  source 1..20: mol_type = other RNA
ttttcaggcttcttaggaat

SEQ ID NO: 8935 - RNA, 20 nt, synthetic construct
  misc_feature 1..20: note = spacer sequence
  source 1..20: mol_type = other RNA
ggcttcttaggaattccttt

SEQ ID NO: 8936 - RNA, 20 nt, synthetic construct
  misc_feature 1..20: note = spacer sequence
  source 1..20: mol_type = other RNA
taggaattcctttccaatct

SEQ ID NO: 8937 - RNA, 20 nt, synthetic construct
  misc_feature 1..20: note = spacer sequence
  source 1..20: mol_type = other RNA
taagaagcctgaaaatgaag

SEQ ID NO: 8938 - RNA, 20 nt, synthetic construct
  misc_feature 1..20: note = spacer sequence
  source 1..20: mol_type = other RNA
tttccaatctgtgagcgtga

SEQ ID NO: 8939 - RNA, 20 nt, synthetic construct
  misc_feature 1..20: note = spacer sequence
  source 1..20: mol_type = other RNA
aatctgtgagcgtgaaagaa

SEQ ID NO: 8940 - RNA, 20 nt, synthetic construct
  misc_feature 1..20: note = spacer sequence
  source 1..20: mol_type = other RNA
gtgagcgtgaaagaaattta

SEQ ID NO: 8941 - RNA, 20 nt, synthetic construct
  misc_feature 1..20: note = spacer sequence
  source 1..20: mol_type = other RNA
cagattggaaaggaattcct

SEQ ID NO: 8942 - RNA, 20 nt, synthetic construct
  misc_feature 1..20: note = spacer sequence
  source 1..20: mol_type = other RNA
cgctcacagattggaaagga

SEQ ID NO: 8943 - RNA, 20 nt, synthetic construct
  misc_feature 1..20: note = spacer sequence
  source 1..20: mol_type = other RNA
ttcacgctcacagattggaa

SEQ ID NO: 8944 - RNA, 20 nt, synthetic construct
  misc_feature 1..20: note = spacer sequence
  source 1..20: mol_type = other RNA
tgttaaatttctttcacgct

SEQ ID NO: 8945 - RNA, 20 nt, synthetic construct
  misc_feature 1..20: note = spacer sequence
  source 1..20: mol_type = other RNA
gtttgtaactttaaatctag

SEQ ID NO: 8946 - RNA, 20 nt, synthetic construct
  misc_feature 1..20: note = spacer sequence
  source 1..20: mol_type = other RNA
agaaatgaaaaatgttgatt

SEQ ID NO: 8947 - RNA, 20 nt, synthetic construct
  misc_feature 1..20: note = spacer sequence
  source 1..20: mol_type = other RNA
agatttaaagttacaaactg

SEQ ID NO: 8948 - RNA, 20 nt, synthetic construct
  misc_feature 1..20: note = spacer sequence
  source 1..20: mol_type = other RNA
tttctagatttaaagttaca

SEQ ID NO: 8949 - RNA, 20 nt, synthetic construct
  misc_feature 1..20: note = spacer sequence
  source 1..20: mol_type = other RNA
acatttttcatttctagatt

SEQ ID NO: 8950 - RNA, 20 nt, synthetic construct
  misc_feature 1..20: note = spacer sequence
  source 1..20: mol_type = other RNA
ttaataactgggctaggttt

SEQ ID NO: 8951 - RNA, 20 nt, synthetic construct
  misc_feature 1..20: note = spacer sequence
  source 1..20: mol_type = other RNA
catgctaattttagaaatag

SEQ ID NO: 8952 - RNA, 20 nt, synthetic construct
  misc_feature 1..20: note = spacer sequence
  source 1..20: mol_type = other RNA
aaaattagcatgggaatttc

SEQ ID NO: 8953 - RNA, 20 nt, synthetic construct
  misc_feature 1..20: note = spacer sequence
  source 1..20: mol_type = other RNA
attgttgttaatttaaataa

SEQ ID NO: 8954 - RNA, 20 nt, synthetic construct
  misc_feature 1..20: note = spacer sequence
  source 1..20: mol_type = other RNA
tttacatgtttctattgttg

SEQ ID NO: 8955 - RNA, 20 nt, synthetic construct
  misc_feature 1..20: note = spacer sequence
  source 1..20: mol_type = other RNA
caagcactctatttatacta

SEQ ID NO: 8956 - RNA, 20 nt, synthetic construct
  misc_feature 1..20: note = spacer sequence
  source 1..20: mol_type = other RNA
atttatactagcttatttag

SEQ ID NO: 8957 - RNA, 20 nt, synthetic construct
  misc_feature 1..20: note = spacer sequence
  source 1..20: mol_type = other RNA
cacaaccatttacaagtaga

SEQ ID NO: 8958 - RNA, 20 nt, synthetic construct
  misc_feature 1..20: note = spacer sequence
  source 1..20: mol_type = other RNA
caaccatttacaagtagata

SEQ ID NO: 8959 - RNA, 20 nt, synthetic construct
  misc_feature 1..20: note = spacer sequence
  source 1..20: mol_type = other RNA
acttgtaaatggttgtgaga

SEQ ID NO: 8960 - RNA, 20 nt, synthetic construct
  misc_feature 1..20: note = spacer sequence
  source 1..20: mol_type = other RNA
catttcacaaatgagaaaag

SEQ ID NO: 8961 - RNA, 20 nt, synthetic construct
  misc_feature 1..20: note = spacer sequence
  source 1..20: mol_type = other RNA
caaatgagaaaagcaaagac

SEQ ID NO: 8962 - RNA, 20 nt, synthetic construct
  misc_feature 1..20: note = spacer sequence
  source 1..20: mol_type = other RNA
tttgtgaaatgggaataata

SEQ ID NO: 8963 - RNA, 20 nt, synthetic construct
  misc_feature 1..20: note = spacer sequence
  source 1..20: mol_type = other RNA
catttgtgaaatgggaataa

SEQ ID NO: 8964 - RNA, 20 nt, synthetic construct
  misc_feature 1..20: note = spacer sequence
  source 1..20: mol_type = other RNA
ttgcttttctcatttgtgaa

SEQ ID NO: 8965 - RNA, 20 nt, synthetic construct
  misc_feature 1..20: note = spacer sequence
  source 1..20: mol_type = other RNA
tgggcaagctgtctttgctt

SEQ ID NO: 8966 - RNA, 20 nt, synthetic construct
  misc_feature 1..20: note = spacer sequence
  source 1..20: mol_type = other RNA
cattcttggtaaatggcagg

SEQ ID NO: 8967 - RNA, 20 nt, synthetic construct
  misc_feature 1..20: note = spacer sequence
  source 1..20: mol_type = other RNA
tggtaaatggcagggacgga

SEQ ID NO: 8968 - RNA, 20 nt, synthetic construct
  misc_feature 1..20: note = spacer sequence
  source 1..20: mol_type = other RNA
ctgccatttaccaagaatgt

SEQ ID NO: 8969 - RNA, 20 nt, synthetic construct
  misc_feature 1..20: note = spacer sequence
  source 1..20: mol_type = other RNA
gtccctgccatttaccaaga

SEQ ID NO: 8970 - RNA, 20 nt, synthetic construct
  misc_feature 1..20: note = spacer sequence
  source 1..20: mol_type = other RNA
actcagacacatttggttct

SEQ ID NO: 8971 - RNA, 20 nt, synthetic construct
  misc_feature 1..20: note = spacer sequence
  source 1..20: mol_type = other RNA
gacacatttggttctagagt

SEQ ID NO: 8972 - RNA, 20 nt, synthetic construct
  misc_feature 1..20: note = spacer sequence
  source 1..20: mol_type = other RNA
gagttgaatccgtccctgcc

SEQ ID NO: 8973 - RNA, 20 nt, synthetic construct
  misc_feature 1..20: note = spacer sequence
  source 1..20: mol_type = other RNA
agagtccatgttcttaacca

SEQ ID NO: 8974 - RNA, 20 nt, synthetic construct
  misc_feature 1..20: note = spacer sequence
  source 1..20: mol_type = other RNA
agaaccaaatgtgtctgagt

SEQ ID NO: 8975 - RNA, 20 nt, synthetic construct
  misc_feature 1..20: note = spacer sequence
  source 1..20: mol_type = other RNA
atgttcttaaccacaagaat

SEQ ID NO: 8976 - RNA, 20 nt, synthetic construct
  misc_feature 1..20: note = spacer sequence
  source 1..20: mol_type = other RNA
taaccacaagaatgtattat

SEQ ID NO: 8977 - RNA, 20 nt, synthetic construct
  misc_feature 1..20: note = spacer sequence
  source 1..20: mol_type = other RNA
tgtggttaagaacatggact

SEQ ID NO: 8978 - RNA, 20 nt, synthetic construct
  misc_feature 1..20: note = spacer sequence
  source 1..20: mol_type = other RNA
aatactttaaataatacatt

SEQ ID NO: 8979 - RNA, 20 nt, synthetic construct
  misc_feature 1..20: note = spacer sequence
  source 1..20: mol_type = other RNA
tttatttctaatactttaaa

SEQ ID NO: 8980 - RNA, 20 nt, synthetic construct
  misc_feature 1..20: note = spacer sequence
  source 1..20: mol_type = other RNA
ttatcctttatttctaatac

SEQ ID NO: 8981 - RNA, 20 nt, synthetic construct
  misc_feature 1..20: note = spacer sequence
  source 1..20: mol_type = other RNA
tgaacacatttcactaatat

SEQ ID NO: 8982 - RNA, 20 nt, synthetic construct
  misc_feature 1..20: note = spacer sequence
  source 1..20: mol_type = other RNA
ggaaatattgggtgtttcat

SEQ ID NO: 8983 - RNA, 20 nt, synthetic construct
  misc_feature 1..20: note = spacer sequence
  source 1..20: mol_type = other RNA
ctaatattaaagaataactt

SEQ ID NO: 8984 - RNA, 20 nt, synthetic construct
  misc_feature 1..20: note = spacer sequence
  source 1..20: mol_type = other RNA
ttaatattagtgaaatgtgt

SEQ ID NO: 8985 - RNA, 20 nt, synthetic construct
  misc_feature 1..20: note = spacer sequence
  source 1..20: mol_type = other RNA
cacctatttccacatatctt

SEQ ID NO: 8986 - RNA, 20 nt, synthetic construct
  misc_feature 1..20: note = spacer sequence
  source 1..20: mol_type = other RNA
acatatcttctagtcaagtg

SEQ ID NO: 8987 - RNA, 20 nt, synthetic construct
  misc_feature 1..20: note = spacer sequence
  source 1..20: mol_type = other RNA
ccctcaccgccctcagaaag

SEQ ID NO: 8988 - RNA, 20 nt, synthetic construct
  misc_feature 1..20: note = spacer sequence
  source 1..20: mol_type = other RNA
cgcctgtaatcccagcactt

SEQ ID NO: 8989 - RNA, 20 nt, synthetic construct
  misc_feature 1..20: note = spacer sequence
  source 1..20: mol_type = other RNA
cagcactttgggaggctgag

SEQ ID NO: 8990 - RNA, 20 nt, synthetic construct
  misc_feature 1..20: note = spacer sequence
  source 1..20: mol_type = other RNA
caaagtgctgggattacagg

SEQ ID NO: 8991 - RNA, 20 nt, synthetic construct
  misc_feature 1..20: note = spacer sequence
  source 1..20: mol_type = other RNA
gcctcccaaagtgctgggat

SEQ ID NO: 8992 - RNA, 20 nt, synthetic construct
  misc_feature 1..20: note = spacer sequence
  source 1..20: mol_type = other RNA
gcctactgcctcagcctccc

SEQ ID NO: 8993 - RNA, 20 nt, synthetic construct
  misc_feature 1..20: note = spacer sequence
  source 1..20: mol_type = other RNA
cctgaggtcaggagttcgag

SEQ ID NO: 8994 - RNA, 20 nt, synthetic construct
  misc_feature 1..20: note = spacer sequence
  source 1..20: mol_type = other RNA
ggtgatctgcctactgcctc

SEQ ID NO: 8995 - RNA, 20 nt, synthetic construct
  misc_feature 1..20: note = spacer sequence
  source 1..20: mol_type = other RNA
ggagttcgaggccagcctaa

SEQ ID NO: 8996 - RNA, 20 nt, synthetic construct
  misc_feature 1..20: note = spacer sequence
  source 1..20: mol_type = other RNA
tgacctcaggtgatctgcct

SEQ ID NO: 8997 - RNA, 20 nt, synthetic construct
  misc_feature 1..20: note = spacer sequence
  source 1..20: mol_type = other RNA
aggccagcctaacatggtga

SEQ ID NO: 8998 - RNA, 20 nt, synthetic construct
  misc_feature 1..20: note = spacer sequence
  source 1..20: mol_type = other RNA
aactcctgacctcaggtgat

SEQ ID NO: 8999 - RNA, 20 nt, synthetic construct
  misc_feature 1..20: note = spacer sequence
  source 1..20: mol_type = other RNA
ttgtcttacacgtttacttt

SEQ ID NO: 9000 - RNA, 20 nt, synthetic construct
  misc_feature 1..20: note = spacer sequence
  source 1..20: mol_type = other RNA
tacacgtttactttagattg

SEQ ID NO: 9001 - RNA, 20 nt, synthetic construct
  misc_feature 1..20: note = spacer sequence
  source 1..20: mol_type = other RNA
aaagtaaacgtgtaagacaa

SEQ ID NO: 9002 - RNA, 20 nt, synthetic construct
  misc_feature 1..20: note = spacer sequence
  source 1..20: mol_type = other RNA
ctggacatctaaaactttcc

SEQ ID NO: 9003 - RNA, 20 nt, synthetic construct
  misc_feature 1..20: note = spacer sequence
  source 1..20: mol_type = other RNA
ggacatctaaaactttccaa

SEQ ID NO: 9004 - RNA, 20 nt, synthetic construct
  misc_feature 1..20: note = spacer sequence
  source 1..20: mol_type = other RNA
agagaagcaatctaaagtaa

SEQ ID NO: 9005 - RNA, 20 nt, synthetic construct
  misc_feature 1..20: note = spacer sequence
  source 1..20: mol_type = other RNA
aaaactttccaaggtaatta

SEQ ID NO: 9006 - RNA, 20 nt, synthetic construct
  misc_feature 1..20: note = spacer sequence
  source 1..20: mol_type = other RNA
aaggtaattatcatgaagca

SEQ ID NO: 9007 - RNA, 20 nt, synthetic construct
  misc_feature 1..20: note = spacer sequence
  source 1..20: mol_type = other RNA
tgaagcactggattaaaacc

SEQ ID NO: 9008 - RNA, 20 nt, synthetic construct
  misc_feature 1..20: note = spacer sequence
  source 1..20: mol_type = other RNA
tgataattaccttggaaagt

SEQ ID NO: 9009 - RNA, 20 nt, synthetic construct
  misc_feature 1..20: note = spacer sequence
  source 1..20: mol_type = other RNA
agtgcttcatgataattacc

SEQ ID NO: 9010 - RNA, 20 nt, synthetic construct
  misc_feature 1..20: note = spacer sequence
  source 1..20: mol_type = other RNA
ggagactgaaggaggagagt

SEQ ID NO: 9011 - RNA, 20 nt, synthetic construct
  misc_feature 1..20: note = spacer sequence
  source 1..20: mol_type = other RNA
cgagtagctgggactacagg

SEQ ID NO: 9012 - RNA, 20 nt, synthetic construct
  misc_feature 1..20: note = spacer sequence
  source 1..20: mol_type = other RNA
cccgagtagctgggactaca

SEQ ID NO: 9013 - RNA, 20 nt, synthetic construct
  misc_feature 1..20: note = spacer sequence
  source 1..20: mol_type = other RNA
gtctcccgagtagctgggac

SEQ ID NO: 9014 - RNA, 20 nt, synthetic construct
  misc_feature 1..20: note = spacer sequence
  source 1..20: mol_type = other RNA
ttcagtctcccgagtagctg

SEQ ID NO: 9015 - RNA, 20 nt, synthetic construct
  misc_feature 1..20: note = spacer sequence
  source 1..20: mol_type = other RNA
tccttcagtctcccgagtag

SEQ ID NO: 9016 - RNA, 20 nt, synthetic construct
  misc_feature 1..20: note = spacer sequence
  source 1..20: mol_type = other RNA
cctccttcagtctcccgagt

SEQ ID NO: 9017 - RNA, 20 nt, synthetic construct
  misc_feature 1..20: note = spacer sequence
  source 1..20: mol_type = other RNA
agccactctcctccttcagt

SEQ ID NO: 9018 - RNA, 20 nt, synthetic construct
  misc_feature 1..20: note = spacer sequence
  source 1..20: mol_type = other RNA
caggttcaagccactctcct

SEQ ID NO: 9019 - RNA, 20 nt, synthetic construct
  misc_feature 1..20: note = spacer sequence
  source 1..20: mol_type = other RNA
gcctcccaggttcaagccac

SEQ ID NO: 9020 - RNA, 20 nt, synthetic construct
  misc_feature 1..20: note = spacer sequence
  source 1..20: mol_type = other RNA
ctgcaacctctgcctcccag

SEQ ID NO: 9021 - RNA, 20 nt, synthetic construct
  misc_feature 1..20: note = spacer sequence
  source 1..20: mol_type = other RNA
tgggtcactgcaacctctgc

SEQ ID NO: 9022 - RNA, 20 nt, synthetic construct
  misc_feature 1..20: note = spacer sequence
  source 1..20: mol_type = other RNA
ctacactccagcctgggcta

SEQ ID NO: 9023 - RNA, 20 nt, synthetic construct
  misc_feature 1..20: note = spacer sequence
  source 1..20: mol_type = other RNA
agcctgggctacagagactc

SEQ ID NO: 9024 - RNA, 20 nt, synthetic construct
  misc_feature 1..20: note = spacer sequence
  source 1..20: mol_type = other RNA
gtagcccaggctggagtgta

SEQ ID NO: 9025 - RNA, 20 nt, synthetic construct
  misc_feature 1..20: note = spacer sequence
  source 1..20: mol_type = other RNA
ctgtagcccaggctggagtg

SEQ ID NO: 9026 - RNA, 20 nt, synthetic construct
  misc_feature 1..20: note = spacer sequence
  source 1..20: mol_type = other RNA
acctcaaaaaataaataaaa

SEQ ID NO: 9027 - RNA, 20 nt, synthetic construct
  misc_feature 1..20: note = spacer sequence
  source 1..20: mol_type = other RNA
aaaaataaataaaaaaaaac

SEQ ID NO: 9028 - RNA, 20 nt, synthetic construct
  misc_feature 1..20: note = spacer sequence
  source 1..20: mol_type = other RNA
ttggtattatgttttttttt

SEQ ID NO: 9029 - RNA, 20 nt, synthetic construct
  misc_feature 1..20: note = spacer sequence
  source 1..20: mol_type = other RNA
gttaagacctatatgattta

SEQ ID NO: 9030 - RNA, 20 nt, synthetic construct
  misc_feature 1..20: note = spacer sequence
  source 1..20: mol_type = other RNA
taactgagcatctttggtat

SEQ ID NO: 9031 - RNA, 20 nt, synthetic construct
  misc_feature 1..20: note = spacer sequence
  source 1..20: mol_type = other RNA
cttatttgcttggtagtaca

SEQ ID NO: 9032 - RNA, 20 nt, synthetic construct
  misc_feature 1..20: note = spacer sequence
  source 1..20: mol_type = other RNA
tacagttcacttatttgctt

SEQ ID NO: 9033 - RNA, 20 nt, synthetic construct
  misc_feature 1..20: note = spacer sequence
  source 1..20: mol_type = other RNA
cttacagttcacttatttgc

SEQ ID NO: 9034 - RNA, 20 nt, synthetic construct
  misc_feature 1..20: note = spacer sequence
  source 1..20: mol_type = other RNA
ctgtccaacattcctccttc

SEQ ID NO: 9035 - RNA, 20 nt, synthetic construct
  misc_feature 1..20: note = spacer sequence
  source 1..20: mol_type = other RNA
aacattcctccttcacaaaa

SEQ ID NO: 9036 - RNA, 20 nt, synthetic construct
  misc_feature 1..20: note = spacer sequence
  source 1..20: mol_type = other RNA
tccttcacaaaaactctcca

SEQ ID NO: 9037 - RNA, 20 nt, synthetic construct
  misc_feature 1..20: note = spacer sequence
  source 1..20: mol_type = other RNA
ttcacaaaaactctccagtt

SEQ ID NO: 9038 - RNA, 20 nt, synthetic construct
  misc_feature 1..20: note = spacer sequence
  source 1..20: mol_type = other RNA
caaaaactctccagttcctc

SEQ ID NO: 9039 - RNA, 20 nt, synthetic construct
  misc_feature 1..20: note = spacer sequence
  source 1..20: mol_type = other RNA
ccagttcctcaggcttgact

SEQ ID NO: 9040 - RNA, 20 nt, synthetic construct
  misc_feature 1..20: note = spacer sequence
  source 1..20: mol_type = other RNA
agttcctcaggcttgacttt

SEQ ID NO: 9041 - RNA, 20 nt, synthetic construct
  misc_feature 1..20: note = spacer sequence
  source 1..20: mol_type = other RNA
tcaggcttgactttgtccca

SEQ ID NO: 9042 - RNA, 20 nt, synthetic construct
  misc_feature 1..20: note = spacer sequence
  source 1..20: mol_type = other RNA
ggcttgactttgtcccatgg

SEQ ID NO: 9043 - RNA, 20 nt, synthetic construct
  misc_feature 1..20: note = spacer sequence
  source 1..20: mol_type = other RNA
agcctgaggaactggagagt

SEQ ID NO: 9044 - RNA, 20 nt, synthetic construct
  misc_feature 1..20: note = spacer sequence
  source 1..20: mol_type = other RNA
catggaatataagtaacacc

SEQ ID NO: 9045 - RNA, 20 nt, synthetic construct
  misc_feature 1..20: note = spacer sequence
  source 1..20: mol_type = other RNA
atgggacaaagtcaagcctg

SEQ ID NO: 9046 - RNA, 20 nt, synthetic construct
  misc_feature 1..20: note = spacer sequence
  source 1..20: mol_type = other RNA
acatcccaatactgcttata

SEQ ID NO: 9047 - RNA, 20 nt, synthetic construct
  misc_feature 1..20: note = spacer sequence
  source 1..20: mol_type = other RNA
caatactgcttataatctgc

SEQ ID NO: 9048 - RNA, 20 nt, synthetic construct
  misc_feature 1..20: note = spacer sequence
  source 1..20: mol_type = other RNA
gcctttattcctttgtttaa

SEQ ID NO: 9049 - RNA, 20 nt, synthetic construct
  misc_feature 1..20: note = spacer sequence
  source 1..20: mol_type = other RNA
tttgtttaaggcccaggcaa

SEQ ID NO: 9050 - RNA, 20 nt, synthetic construct
  misc_feature 1..20: note = spacer sequence
  source 1..20: mol_type = other RNA
atttcaccattagtgaaaat

SEQ ID NO: 9051 - RNA, 20 nt, synthetic construct
  misc_feature 1..20: note = spacer sequence
  source 1..20: mol_type = other RNA
ccattagtgaaaatataaaa

SEQ ID NO: 9052 - RNA, 20 nt, synthetic construct
  misc_feature 1..20: note = spacer sequence
  source 1..20: mol_type = other RNA
ctaatggtgaaatagattgc

SEQ ID NO: 9053 - RNA, 20 nt, synthetic construct
  misc_feature 1..20: note = spacer sequence
  source 1..20: mol_type = other RNA
ttttatattttcactaatgg

SEQ ID NO: 9054 - RNA, 20 nt, synthetic construct
  misc_feature 1..20: note = spacer sequence
  source 1..20: mol_type = other RNA
taagtcttgagggtattatt

SEQ ID NO: 9055 - RNA, 20 nt, synthetic construct
  misc_feature 1..20: note = spacer sequence
  source 1..20: mol_type = other RNA
tgagggtattattctctatc

SEQ ID NO: 9056 - RNA, 20 nt, synthetic construct
  misc_feature 1..20: note = spacer sequence
  source 1..20: mol_type = other RNA
ccacctttggtgaatatttt

SEQ ID NO: 9057 - RNA, 20 nt, synthetic construct
  misc_feature 1..20: note = spacer sequence
  source 1..20: mol_type = other RNA
acctttggtgaatatttttc

SEQ ID NO: 9058 - RNA, 20 nt, synthetic construct
  misc_feature 1..20: note = spacer sequence
  source 1..20: mol_type = other RNA
ccaaaggtggagaaaaacat

SEQ ID NO: 9059 - RNA, 20 nt, synthetic construct
  misc_feature 1..20: note = spacer sequence
  source 1..20: mol_type = other RNA
gttaattctaagatggcaaa

SEQ ID NO: 9060 - RNA, 20 nt, synthetic construct
  misc_feature 1..20: note = spacer sequence
  source 1..20: mol_type = other RNA
aagatggcaaactttaaaaa

SEQ ID NO: 9061 - RNA, 20 nt, synthetic construct
  misc_feature 1..20: note = spacer sequence
  source 1..20: mol_type = other RNA
tagaattaactgaaaaatat

SEQ ID NO: 9062 - RNA, 20 nt, synthetic construct
  misc_feature 1..20: note = spacer sequence
  source 1..20: mol_type = other RNA
aaattttttgaacaggacaa

SEQ ID NO: 9063 - RNA, 20 nt, synthetic construct
  misc_feature 1..20: note = spacer sequence
  source 1..20: mol_type = other RNA
tggtaaattagtgctttaaa

SEQ ID NO: 9064 - RNA, 20 nt, synthetic construct
  misc_feature 1..20: note = spacer sequence
  source 1..20: mol_type = other RNA
tcatggtaaattagtgcttt

SEQ ID NO: 9065 - RNA, 20 nt, synthetic construct
  misc_feature 1..20: note = spacer sequence
  source 1..20: mol_type = other RNA
acatttaggaaaaacaaaac

SEQ ID NO: 9066 - RNA, 20 nt, synthetic construct
  misc_feature 1..20: note = spacer sequence
  source 1..20: mol_type = other RNA
taaatgtagatgggttcatc

SEQ ID NO: 9067 - RNA, 20 nt, synthetic construct
  misc_feature 1..20: note = spacer sequence
  source 1..20: mol_type = other RNA
accatgcacgtaacatttac

SEQ ID NO: 9068 - RNA, 20 nt, synthetic construct
  misc_feature 1..20: note = spacer sequence
  source 1..20: mol_type = other RNA
tacatgttataattaatttt

SEQ ID NO: 9069 - RNA, 20 nt, synthetic construct
  misc_feature 1..20: note = spacer sequence
  source 1..20: mol_type = other RNA
ataaaggtacagtcttacat

SEQ ID NO: 9070 - RNA, 20 nt, synthetic construct
  misc_feature 1..20: note = spacer sequence
  source 1..20: mol_type = other RNA
ggttcactttatagtttcct

SEQ ID NO: 9071 - RNA, 20 nt, synthetic construct
  misc_feature 1..20: note = spacer sequence
  source 1..20: mol_type = other RNA
ctttatagtttcctcggctc

SEQ ID NO: 9072 - RNA, 20 nt, synthetic construct
  misc_feature 1..20: note = spacer sequence
  source 1..20: mol_type = other RNA
tcggctcagtttctgcaggg

SEQ ID NO: 9073 - RNA, 20 nt, synthetic construct
  misc_feature 1..20: note = spacer sequence
  source 1..20: mol_type = other RNA
gctcagtttctgcagggcac

SEQ ID NO: 9074 - RNA, 20 nt, synthetic construct
  misc_feature 1..20: note = spacer sequence
  source 1..20: mol_type = other RNA
gtttctgcagggcacgatag

SEQ ID NO: 9075 - RNA, 20 nt, synthetic construct
  misc_feature 1..20: note = spacer sequence
  source 1..20: mol_type = other RNA
gcagggcacgataggcatct

SEQ ID NO: 9076 - RNA, 20 nt, synthetic construct
  misc_feature 1..20: note = spacer sequence
  source 1..20: mol_type = other RNA
tgccctgcagaaactgagcc

SEQ ID NO: 9077 - RNA, 20 nt, synthetic construct
  misc_feature 1..20: note = spacer sequence
  source 1..20: mol_type = other RNA
tgcctatgaaccataacaat

SEQ ID NO: 9078 - RNA, 20 nt, synthetic construct
  misc_feature 1..20: note = spacer sequence
  source 1..20: mol_type = other RNA
taggcaagatgcctatcgtg

SEQ ID NO: 9079 - RNA, 20 nt, synthetic construct
  misc_feature 1..20: note = spacer sequence
  source 1..20: mol_type = other RNA
caggggttgtgcctatattg

SEQ ID NO: 9080 - RNA, 20 nt, synthetic construct
  misc_feature 1..20: note = spacer sequence
  source 1..20: mol_type = other RNA
tcccaggggttgtgcctata

SEQ ID NO: 9081 - RNA, 20 nt, synthetic construct
  misc_feature 1..20: note = spacer sequence
  source 1..20: mol_type = other RNA
tctgctccaaaacattttaa

SEQ ID NO: 9082 - RNA, 20 nt, synthetic construct
  misc_feature 1..20: note = spacer sequence
  source 1..20: mol_type = other RNA
gctccaaaacattttaatat

SEQ ID NO: 9083 - RNA, 20 nt, synthetic construct
  misc_feature 1..20: note = spacer sequence
  source 1..20: mol_type = other RNA
aaaacattttaatattataa

SEQ ID NO: 9084 - RNA, 20 nt, synthetic construct
  misc_feature 1..20: note = spacer sequence
  source 1..20: mol_type = other RNA
tttataatattaaaatgttt

SEQ ID NO: 9085 - RNA, 20 nt, synthetic construct
  misc_feature 1..20: note = spacer sequence
  source 1..20: mol_type = other RNA
attttgttatcttttataat

SEQ ID NO: 9086 - RNA, 20 nt, synthetic construct
  misc_feature 1..20: note = spacer sequence
  source 1..20: mol_type = other RNA
cacctgtccatcgtacttaa

SEQ ID NO: 9087 - RNA, 20 nt, synthetic construct
  misc_feature 1..20: note = spacer sequence
  source 1..20: mol_type = other RNA
atcgtacttaaaaaactgaa

SEQ ID NO: 9088 - RNA, 20 nt, synthetic construct
  misc_feature 1..20: note = spacer sequence
  source 1..20: mol_type = other RNA
tacttaaaaaactgaataaa

SEQ ID NO: 9089 - RNA, 20 nt, synthetic construct
  misc_feature 1..20: note = spacer sequence
  source 1..20: mol_type = other RNA
gttttttaagtacgatggac

SEQ ID NO: 9090 - RNA, 20 nt, synthetic construct
  misc_feature 1..20: note = spacer sequence
  source 1..20: mol_type = other RNA
cattaattgattcaattgga

SEQ ID NO: 9091 - RNA, 20 nt, synthetic construct
  misc_feature 1..20: note = spacer sequence
  source 1..20: mol_type = other RNA
attaatgtgagtgtttattc

SEQ ID NO: 9092 - RNA, 20 nt, synthetic construct
  misc_feature 1..20: note = spacer sequence
  source 1..20: mol_type = other RNA
attggaccaaactcttccaa

SEQ ID NO: 9093 - RNA, 20 nt, synthetic construct
  misc_feature 1..20: note = spacer sequence
  source 1..20: mol_type = other RNA
aattgaatcaattaatgtga

SEQ ID NO: 9094 - RNA, 20 nt, synthetic construct
  misc_feature 1..20: note = spacer sequence
  source 1..20: mol_type = other RNA
tccaagagactggcaacatc

SEQ ID NO: 9095 - RNA, 20 nt, synthetic construct
  misc_feature 1..20: note = spacer sequence
  source 1..20: mol_type = other RNA
aagagactggcaacatcctg

SEQ ID NO: 9096 - RNA, 20 nt, synthetic construct
  misc_feature 1..20: note = spacer sequence
  source 1..20: mol_type = other RNA
tggaagagtttggtccaatt

SEQ ID NO: 9097 - RNA, 20 nt, synthetic construct
  misc_feature 1..20: note = spacer sequence
  source 1..20: mol_type = other RNA
cttggaagagtttggtccaa

SEQ ID NO: 9098 - RNA, 20 nt, synthetic construct
  misc_feature 1..20: note = spacer sequence
  source 1..20: mol_type = other RNA
tgctgagtagttcttttgtc

SEQ ID NO: 9099 - RNA, 20 nt, synthetic construct
  misc_feature 1..20: note = spacer sequence
  source 1..20: mol_type = other RNA
gcaggatgttgccagtctct

SEQ ID NO: 9100 - RNA, 20 nt, synthetic construct
  misc_feature 1..20: note = spacer sequence
  source 1..20: mol_type = other RNA
tttgtccagctgccccaccc

SEQ ID NO: 9101 - RNA, 20 nt, synthetic construct
  misc_feature 1..20: note = spacer sequence
  source 1..20: mol_type = other RNA
agctgccccacccagagggt

SEQ ID NO: 9102 - RNA, 20 nt, synthetic construct
  misc_feature 1..20: note = spacer sequence
  source 1..20: mol_type = other RNA
gggtggggcagctggacaaa

SEQ ID NO: 9103 - RNA, 20 nt, synthetic construct
  misc_feature 1..20: note = spacer sequence
  source 1..20: mol_type = other RNA
taaagagattcacatttgat

SEQ ID NO: 9104 - RNA, 20 nt, synthetic construct
  misc_feature 1..20: note = spacer sequence
  source 1..20: mol_type = other RNA
ttatgattgtaattttattt

SEQ ID NO: 9105 - RNA, 20 nt, synthetic construct
  misc_feature 1..20: note = spacer sequence
  source 1..20: mol_type = other RNA
ctttatgattgtaattttat

SEQ ID NO: 9106 - RNA, 20 nt, synthetic construct
  misc_feature 1..20: note = spacer sequence
  source 1..20: mol_type = other RNA
catttgataatgagcagcac

SEQ ID NO: 9107 - RNA, 20 nt, synthetic construct
  misc_feature 1..20: note = spacer sequence
  source 1..20: mol_type = other RNA
aatgtgaatctctttatgat

SEQ ID NO: 9108 - RNA, 20 nt, synthetic construct
  misc_feature 1..20: note = spacer sequence
  source 1..20: mol_type = other RNA
ccctgccaatgaacagcaga

SEQ ID NO: 9109 - RNA, 20 nt, synthetic construct
  misc_feature 1..20: note = spacer sequence
  source 1..20: mol_type = other RNA
ttggcagggtgaggtgggca

SEQ ID NO: 9110 - RNA, 20 nt, synthetic construct
  misc_feature 1..20: note = spacer sequence
  source 1..20: mol_type = other RNA
gctgttcattggcagggtga

SEQ ID NO: 9111 - RNA, 20 nt, synthetic construct
  misc_feature 1..20: note = spacer sequence
  source 1..20: mol_type = other RNA
tagttctgctgttcattggc

SEQ ID NO: 9112 - RNA, 20 nt, synthetic construct
  misc_feature 1..20: note = spacer sequence
  source 1..20: mol_type = other RNA
aatcctagttctgctgttca

SEQ ID NO: 9113 - RNA, 20 nt, synthetic construct
  misc_feature 1..20: note = spacer sequence
  source 1..20: mol_type = other RNA
agtctcttgattaccaacca

SEQ ID NO: 9114 - RNA, 20 nt, synthetic construct
  misc_feature 1..20: note = spacer sequence
  source 1..20: mol_type = other RNA
cttgattaccaaccagctca

SEQ ID NO: 9115 - RNA, 20 nt, synthetic construct
  misc_feature 1..20: note = spacer sequence
  source 1..20: mol_type = other RNA
tgattaccaaccagctcagt

SEQ ID NO: 9116 - RNA, 20 nt, synthetic construct
  misc_feature 1..20: note = spacer sequence
  source 1..20: mol_type = other RNA
agagacttgagctccaatcc

SEQ ID NO: 9117 - RNA, 20 nt, synthetic construct
  misc_feature 1..20: note = spacer sequence
  source 1..20: mol_type = other RNA
gtgctttgttcacttgcatg

SEQ ID NO: 9118 - RNA, 20 nt, synthetic construct
  misc_feature 1..20: note = spacer sequence
  source 1..20: mol_type = other RNA
ttgatgtatacccttagatt

SEQ ID NO: 9119 - RNA, 20 nt, synthetic construct
  misc_feature 1..20: note = spacer sequence
  source 1..20: mol_type = other RNA
tgtgccttgtttattcattg

SEQ ID NO: 9120 - RNA, 20 nt, synthetic construct
  misc_feature 1..20: note = spacer sequence
  source 1..20: mol_type = other RNA
aataaaaatcaacacagtgg

SEQ ID NO: 9121 - RNA, 20 nt, synthetic construct
  misc_feature 1..20: note = spacer sequence
  source 1..20: mol_type = other RNA
acacagtggtaacatttctt

SEQ ID NO: 9122 - RNA, 20 nt, synthetic construct
  misc_feature 1..20: note = spacer sequence
  source 1..20: mol_type = other RNA
tttatagttttgctaacagt

SEQ ID NO: 9123 - RNA, 20 nt, synthetic construct
  misc_feature 1..20: note = spacer sequence
  source 1..20: mol_type = other RNA
tgtactattttttcatgtct

SEQ ID NO: 9124 - RNA, 20 nt, synthetic construct
  misc_feature 1..20: note = spacer sequence
  source 1..20: mol_type = other RNA
aacctcatgtactatttttt

SEQ ID NO: 9125 - RNA, 20 nt, synthetic construct
  misc_feature 1..20: note = spacer sequence
  source 1..20: mol_type = other RNA
acctttatattcaaacctca

SEQ ID NO: 9126 - RNA, 20 nt, synthetic construct
  misc_feature 1..20: note = spacer sequence
  source 1..20: mol_type = other RNA
ggtttcacttgagggaggcc

SEQ ID NO: 9127 - RNA, 20 nt, synthetic construct
  misc_feature 1..20: note = spacer sequence
  source 1..20: mol_type = other RNA
cttgagggaggcctttttgt

SEQ ID NO: 9128 - RNA, 20 nt, synthetic construct
  misc_feature 1..20: note = spacer sequence
  source 1..20: mol_type = other RNA
agtgaaaccggaaactgcaa

SEQ ID NO: 9129 - RNA, 20 nt, synthetic construct
  misc_feature 1..20: note = spacer sequence
  source 1..20: mol_type = other RNA
ctcaagtgaaaccggaaact

SEQ ID NO: 9130 - RNA, 20 nt, synthetic construct
  misc_feature 1..20: note = spacer sequence
  source 1..20: mol_type = other RNA
acgttctctctctttttctc

SEQ ID NO: 9131 - RNA, 20 nt, synthetic construct
  misc_feature 1..20: note = spacer sequence
  source 1..20: mol_type = other RNA
acaaaaaggcctccctcaag

SEQ ID NO: 9132 - RNA, 20 nt, synthetic construct
  misc_feature 1..20: note = spacer sequence
  source 1..20: mol_type = other RNA
ctctctttttctcgatcccg

SEQ ID NO: 9133 - RNA, 20 nt, synthetic construct
  misc_feature 1..20: note = spacer sequence
  source 1..20: mol_type = other RNA
ctctttttctcgatcccgtc

SEQ ID NO: 9134 - RNA, 20 nt, synthetic construct
  misc_feature 1..20: note = spacer sequence
  source 1..20: mol_type = other RNA
ctttttctcgatcccgtctt

SEQ ID NO: 9135 - RNA, 20 nt, synthetic construct
  misc_feature 1..20: note = spacer sequence
  source 1..20: mol_type = other RNA
ttttctcgatcccgtctttc

SEQ ID NO: 9136 - RNA, 20 nt, synthetic construct
  misc_feature 1..20: note = spacer sequence
  source 1..20: mol_type = other RNA
cgatcccgtctttcttgaga

SEQ ID NO: 9137 - RNA, 20 nt, synthetic construct
  misc_feature 1..20: note = spacer sequence
  source 1..20: mol_type = other RNA
atcccgtctttcttgagatc

SEQ ID NO: 9138 - RNA, 20 nt, synthetic construct
  misc_feature 1..20: note = spacer sequence
  source 1..20: mol_type = other RNA
agaaaaagagagagaacgtc

SEQ ID NO: 9139 - RNA, 20 nt, synthetic construct
  misc_feature 1..20: note = spacer sequence
  source 1..20: mol_type = other RNA
cgtctttcttgagatcgaga

SEQ ID NO: 9140 - RNA, 20 nt, synthetic construct
  misc_feature 1..20: note = spacer sequence
  source 1..20: mol_type = other RNA
ttcttgagatcgagatcggg

SEQ ID NO: 9141 - RNA, 20 nt, synthetic construct
  misc_feature 1..20: note = spacer sequence
  source 1..20: mol_type = other RNA
tgagatcgagatcggggaga

SEQ ID NO: 9142 - RNA, 20 nt, synthetic construct
  misc_feature 1..20: note = spacer sequence
  source 1..20: mol_type = other RNA
agaaagacgggatcgagaaa

SEQ ID NO: 9143 - RNA, 20 nt, synthetic construct
  misc_feature 1..20: note = spacer sequence
  source 1..20: mol_type = other RNA
caagaaagacgggatcgaga

SEQ ID NO: 9144 - RNA, 20 nt, synthetic construct
  misc_feature 1..20: note = spacer sequence
  source 1..20: mol_type = other RNA
agatcggggagaatgtcggc

SEQ ID NO: 9145 - RNA, 20 nt, synthetic construct
  misc_feature 1..20: note = spacer sequence
  source 1..20: mol_type = other RNA
atctcaagaaagacgggatc

SEQ ID NO: 9146 - RNA, 20 nt, synthetic construct
  misc_feature 1..20: note = spacer sequence
  source 1..20: mol_type = other RNA
cgatctcaagaaagacggga

SEQ ID NO: 9147 - RNA, 20 nt, synthetic construct
  misc_feature 1..20: note = spacer sequence
  source 1..20: mol_type = other RNA
gggagaatgtcggcgtctat

SEQ ID NO: 9148 - RNA, 20 nt, synthetic construct
  misc_feature 1..20: note = spacer sequence
  source 1..20: mol_type = other RNA
ccgatctcgatctcaagaaa

SEQ ID NO: 9149 - RNA, 20 nt, synthetic construct
  misc_feature 1..20: note = spacer sequence
  source 1..20: mol_type = other RNA
ccccgatctcgatctcaaga

SEQ ID NO: 9150 - RNA, 20 nt, synthetic construct
  misc_feature 1..20: note = spacer sequence
  source 1..20: mol_type = other RNA
gcgtctatccctggaccgag

SEQ ID NO: 9151 - RNA, 20 nt, synthetic construct
  misc_feature 1..20: note = spacer sequence
  source 1..20: mol_type = other RNA
atccctggaccgagatcgag

SEQ ID NO: 9152 - RNA, 20 nt, synthetic construct
  misc_feature 1..20: note = spacer sequence
  source 1..20: mol_type = other RNA
ctggaccgagatcgagaacg

SEQ ID NO: 9153 - RNA, 20 nt, synthetic construct
  misc_feature 1..20: note = spacer sequence
  source 1..20: mol_type = other RNA
agggatagacgccgacattc

SEQ ID NO: 9154 - RNA, 20 nt, synthetic construct
  misc_feature 1..20: note = spacer sequence
  source 1..20: mol_type = other RNA
gtccagggatagacgccgac

SEQ ID NO: 9155 - RNA, 20 nt, synthetic construct
  misc_feature 1..20: note = spacer sequence
  source 1..20: mol_type = other RNA
cggtccagggatagacgccg

SEQ ID NO: 9156 - RNA, 20 nt, synthetic construct
  misc_feature 1..20: note = spacer sequence
  source 1..20: mol_type = other RNA
agaacgtcgatgccgagacc

SEQ ID NO: 9157 - RNA, 20 nt, synthetic construct
  misc_feature 1..20: note = spacer sequence
  source 1..20: mol_type = other RNA
atctcggtccagggatagac

SEQ ID NO: 9158 - RNA, 20 nt, synthetic construct
  misc_feature 1..20: note = spacer sequence
  source 1..20: mol_type = other RNA
cgatctcggtccagggatag

SEQ ID NO: 9159 - RNA, 20 nt, synthetic construct
  misc_feature 1..20: note = spacer sequence
  source 1..20: mol_type = other RNA
atgccgagaccttcgagatc

SEQ ID NO: 9160 - RNA, 20 nt, synthetic construct
  misc_feature 1..20: note = spacer sequence
  source 1..20: mol_type = other RNA
acgttctcgatctcggtcca

SEQ ID NO: 9161 - RNA, 20 nt, synthetic construct
  misc_feature 1..20: note = spacer sequence
  source 1..20: mol_type = other RNA
gcatcgacgttctcgatctc

SEQ ID NO: 9162 - RNA, 20 nt, synthetic construct
  misc_feature 1..20: note = spacer sequence
  source 1..20: mol_type = other RNA
cggcatcgacgttctcgatc

SEQ ID NO: 9163 - RNA, 20 nt, synthetic construct
  misc_feature 1..20: note = spacer sequence
  source 1..20: mol_type = other RNA
agatctagaaccagatctag

SEQ ID NO: 9164 - RNA, 20 nt, synthetic construct
  misc_feature 1..20: note = spacer sequence
  source 1..20: mol_type = other RNA
aaggtctcggcatcgacgtt

SEQ ID NO: 9165 - RNA, 20 nt, synthetic construct
  misc_feature 1..20: note = spacer sequence
  source 1..20: mol_type = other RNA
cgaaggtctcggcatcgacg

SEQ ID NO: 9166 - RNA, 20 nt, synthetic construct
  misc_feature 1..20: note = spacer sequence
  source 1..20: mol_type = other RNA
agaaccagatctagatcgcc

SEQ ID NO: 9167 - RNA, 20 nt, synthetic construct
  misc_feature 1..20: note = spacer sequence
  source 1..20: mol_type = other RNA
agatctcgaaggtctcggca

SEQ ID NO: 9168 - RNA, 20 nt, synthetic construct
  misc_feature 1..20: note = spacer sequence
  source 1..20: mol_type = other RNA
ggttctagatctcgaaggtc

SEQ ID NO: 9169 - RNA, 20 nt, synthetic construct
  misc_feature 1..20: note = spacer sequence
  source 1..20: mol_type = other RNA
agatcgcctcctttttggtg

SEQ ID NO: 9170 - RNA, 20 nt, synthetic construct
  misc_feature 1..20: note = spacer sequence
  source 1..20: mol_type = other RNA
agatctggttctagatctcg

SEQ ID NO: 9171 - RNA, 20 nt, synthetic construct
  misc_feature 1..20: note = spacer sequence
  source 1..20: mol_type = other RNA
cctcctttttggtgacctaa

SEQ ID NO: 9172 - RNA, 20 nt, synthetic construct
  misc_feature 1..20: note = spacer sequence
  source 1..20: mol_type = other RNA
tttttggtgacctaatgttt

SEQ ID NO: 9173 - RNA, 20 nt, synthetic construct
  misc_feature 1..20: note = spacer sequence
  source 1..20: mol_type = other RNA
ccaaaaaggaggcgatctag

SEQ ID NO: 9174 - RNA, 20 nt, synthetic construct
  misc_feature 1..20: note = spacer sequence
  source 1..20: mol_type = other RNA
agagaagggagaatgcatag

SEQ ID NO: 9175 - RNA, 20 nt, synthetic construct
  misc_feature 1..20: note = spacer sequence
  source 1..20: mol_type = other RNA
tgaaaacattaggtcaccaa

SEQ ID NO: 9176 - RNA, 20 nt, synthetic construct
  misc_feature 1..20: note = spacer sequence
  source 1..20: mol_type = other RNA
cttgaaaacattaggtcacc

SEQ ID NO: 9177 - RNA, 20 nt, synthetic construct
  misc_feature 1..20: note = spacer sequence
  source 1..20: mol_type = other RNA
cttctcttgaaaacattagg

SEQ ID NO: 9178 - RNA, 20 nt, synthetic construct
  misc_feature 1..20: note = spacer sequence
  source 1..20: mol_type = other RNA
cccttctcttgaaaacatta

SEQ ID NO: 9179 - RNA, 20 nt, synthetic construct
  misc_feature 1..20: note = spacer sequence
  source 1..20: mol_type = other RNA
atatgctatgcattctccct

SEQ ID NO: 9180 - RNA, 20 nt, synthetic construct
  misc_feature 1..20: note = spacer sequence
  source 1..20: mol_type = other RNA
atgtcccctaagatatacag

SEQ ID NO: 9181 - RNA, 20 nt, synthetic construct
  misc_feature 1..20: note = spacer sequence
  source 1..20: mol_type = other RNA
cctaagatatacagggttgg

SEQ ID NO: 9182 - RNA, 20 nt, synthetic construct
  misc_feature 1..20: note = spacer sequence
  source 1..20: mol_type = other RNA
taggggacatagaaattaaa

SEQ ID NO: 9183 - RNA, 20 nt, synthetic construct
  misc_feature 1..20: note = spacer sequence
  source 1..20: mol_type = other RNA
aaccctgtatatcttagggg

SEQ ID NO: 9184 - RNA, 20 nt, synthetic construct
  misc_feature 1..20: note = spacer sequence
  source 1..20: mol_type = other RNA
ataaattacctggatgctga

SEQ ID NO: 9185 - RNA, 20 nt, synthetic construct
  misc_feature 1..20: note = spacer sequence
  source 1..20: mol_type = other RNA
aggtaatttatagaaaatgt

SEQ ID NO: 9186 - RNA, 20 nt, synthetic construct
  misc_feature 1..20: note = spacer sequence
  source 1..20: mol_type = other RNA
gcatccaggtaatttataga

SEQ ID NO: 9187 - RNA, 20 nt, synthetic construct
  misc_feature 1..20: note = spacer sequence
  source 1..20: mol_type = other RNA
aggtcagcatccaggtaatt

SEQ ID NO: 9188 - RNA, 20 nt, synthetic construct
  misc_feature 1..20: note = spacer sequence
  source 1..20: mol_type = other RNA
tgactttctgttatcagaca

SEQ ID NO: 9189 - RNA, 20 nt, synthetic construct
  misc_feature 1..20: note = spacer sequence
  source 1..20: mol_type = other RNA
agatctaggtcagcatccag

SEQ ID NO: 9190 - RNA, 20 nt, synthetic construct
  misc_feature 1..20: note = spacer sequence
  source 1..20: mol_type = other RNA
gttatcagacatatgtcgct

SEQ ID NO: 9191 - RNA, 20 nt, synthetic construct
  misc_feature 1..20: note = spacer sequence
  source 1..20: mol_type = other RNA
gacatatgtcgcttaacctc

SEQ ID NO: 9192 - RNA, 20 nt, synthetic construct
  misc_feature 1..20: note = spacer sequence
  source 1..20: mol_type = other RNA
gataacagaaagtcaagatc

SEQ ID NO: 9193 - RNA, 20 nt, synthetic construct
  misc_feature 1..20: note = spacer sequence
  source 1..20: mol_type = other RNA
cttaacctcttgaatacaag

SEQ ID NO: 9194 - RNA, 20 nt, synthetic construct
  misc_feature 1..20: note = spacer sequence
  source 1..20: mol_type = other RNA
tgaatacaaggttgttctac

SEQ ID NO: 9195 - RNA, 20 nt, synthetic construct
  misc_feature 1..20: note = spacer sequence
  source 1..20: mol_type = other RNA
agaggttaagcgacatatgt

SEQ ID NO: 9196 - RNA, 20 nt, synthetic construct
  misc_feature 1..20: note = spacer sequence
  source 1..20: mol_type = other RNA
acttccatttccttaaaaaa

SEQ ID NO: 9197 - RNA, 20 nt, synthetic construct
  misc_feature 1..20: note = spacer sequence
  source 1..20: mol_type = other RNA
atttccttaaaaaacaaaaa

SEQ ID NO: 9198 - RNA, 20 nt, synthetic construct
  misc_feature 1..20: note = spacer sequence
  source 1..20: mol_type = other RNA
ttaaaaaacaaaaaccatga

SEQ ID NO: 9199 - RNA, 20 nt, synthetic construct
  misc_feature 1..20: note = spacer sequence
  source 1..20: mol_type = other RNA
tggtttttgttttttaagga

SEQ ID NO: 9200 - RNA, 20 nt, synthetic construct
  misc_feature 1..20: note = spacer sequence
  source 1..20: mol_type = other RNA
ttttatcatggtttttgttt

SEQ ID NO: 9201 - RNA, 20 nt, synthetic construct
  misc_feature 1..20: note = spacer sequence
  source 1..20: mol_type = other RNA
cattttatcatggtttttgt

SEQ ID NO: 9202 - RNA, 20 nt, synthetic construct
  misc_feature 1..20: note = spacer sequence
  source 1..20: mol_type = other RNA
ttttttgttgccttgactta

SEQ ID NO: 9203 - RNA, 20 nt, synthetic construct
  misc_feature 1..20: note = spacer sequence
  source 1..20: mol_type = other RNA
gagaataaagttttacctgc

SEQ ID NO: 9204 - RNA, 20 nt, synthetic construct
  misc_feature 1..20: note = spacer sequence
  source 1..20: mol_type = other RNA
gatagttttatctttttttg

SEQ ID NO: 9205 - RNA, 20 nt, synthetic construct
  misc_feature 1..20: note = spacer sequence
  source 1..20: mol_type = other RNA
cagatagttttatctttttt

SEQ ID NO: 9206 - RNA, 20 nt, synthetic construct
  misc_feature 1..20: note = spacer sequence
  source 1..20: mol_type = other RNA
gcaggtaaaactttattctc

SEQ ID NO: 9207 - RNA, 20 nt, synthetic construct
  misc_feature 1..20: note = spacer sequence
  source 1..20: mol_type = other RNA
gtgtaagtggttcattttgt

SEQ ID NO: 9208 - RNA, 20 nt, synthetic construct
  misc_feature 1..20: note = spacer sequence
  source 1..20: mol_type = other RNA
ttttgtgcctgaaaagaagc

SEQ ID NO: 9209 - RNA, 20 nt, synthetic construct
  misc_feature 1..20: note = spacer sequence
  source 1..20: mol_type = other RNA
ggcacaaaatgaaccactta

SEQ ID NO: 9210 - RNA, 20 nt, synthetic construct
  misc_feature 1..20: note = spacer sequence
  source 1..20: mol_type = other RNA
tttcaggcacaaaatgaacc

SEQ ID NO: 9211 - RNA, 20 nt, synthetic construct
  misc_feature 1..20: note = spacer sequence
  source 1..20: mol_type = other RNA
aagcttcttttcaggcacaa

SEQ ID NO: 9212 - RNA, 20 nt, synthetic construct
  misc_feature 1..20: note = spacer sequence
  source 1..20: mol_type = other RNA
accagtgcagcagcctttcc

SEQ ID NO: 9213 - RNA, 20 nt, synthetic construct
  misc_feature 1..20: note = spacer sequence
  source 1..20: mol_type = other RNA
aactccaccagtgcagcagc

SEQ ID NO: 9214 - RNA, 20 nt, synthetic construct
  misc_feature 1..20: note = spacer sequence
  source 1..20: mol_type = other RNA
tccaactccaccagtgcagc

SEQ ID NO: 9215 - RNA, 20 nt, synthetic construct
  misc_feature 1..20: note = spacer sequence
  source 1..20: mol_type = other RNA
caggctgagccatgggagga

SEQ ID NO: 9216 - RNA, 20 nt, synthetic construct
  misc_feature 1..20: note = spacer sequence
  source 1..20: mol_type = other RNA
gcctgtgattcctccaactc

SEQ ID NO: 9217 - RNA, 20 nt, synthetic construct
  misc_feature 1..20: note = spacer sequence
  source 1..20: mol_type = other RNA
catggctcagcctgtgattc

SEQ ID NO: 9218 - RNA, 20 nt, synthetic construct
  misc_feature 1..20: note = spacer sequence
  source 1..20: mol_type = other RNA
tcccatggctcagcctgtga

SEQ ID NO: 9219 - RNA, 20 nt, synthetic construct
  misc_feature 1..20: note = spacer sequence
  source 1..20: mol_type = other RNA
atttcctcccatggctcagc

SEQ ID NO: 9220 - RNA, 20 nt, synthetic construct
  misc_feature 1..20: note = spacer sequence
  source 1..20: mol_type = other RNA
tacacctccatttcctccca

SEQ ID NO: 9221 - RNA, 20 nt, synthetic construct
  misc_feature 1..20: note = spacer sequence
  source 1..20: mol_type = other RNA
tcctacacctccatttcctc

SEQ ID NO: 9222 - RNA, 20 nt, synthetic construct
  misc_feature 1..20: note = spacer sequence
  source 1..20: mol_type = other RNA
aaatcctggcatttgtccat

SEQ ID NO: 9223 - RNA, 20 nt, synthetic construct
  misc_feature 1..20: note = spacer sequence
  source 1..20: mol_type = other RNA
tggcatttgtccattaggag

SEQ ID NO: 9224 - RNA, 20 nt, synthetic construct
  misc_feature 1..20: note = spacer sequence
  source 1..20: mol_type = other RNA
attaggaggaagtggaacct

SEQ ID NO: 9225 - RNA, 20 nt, synthetic construct
  misc_feature 1..20: note = spacer sequence
  source 1..20: mol_type = other RNA
taatggacaaatgccaggat

SEQ ID NO: 9226 - RNA, 20 nt, synthetic construct
  misc_feature 1..20: note = spacer sequence
  source 1..20: mol_type = other RNA
tcctaatggacaaatgccag

SEQ ID NO: 9227 - RNA, 20 nt, synthetic construct
  misc_feature 1..20: note = spacer sequence
  source 1..20: mol_type = other RNA
acttcctcctaatggacaaa

SEQ ID NO: 9228 - RNA, 20 nt, synthetic construct
  misc_feature 1..20: note = spacer sequence
  source 1..20: mol_type = other RNA
tttttaaagaaagtgtatga

SEQ ID NO: 9229 - RNA, 20 nt, synthetic construct
  misc_feature 1..20: note = spacer sequence
  source 1..20: mol_type = other RNA
ttaaaaatgaaaggttccac

SEQ ID NO: 9230 - RNA, 20 nt, synthetic construct
  misc_feature 1..20: note = spacer sequence
  source 1..20: mol_type = other RNA
tacactttctttaaaaatga

SEQ ID NO: 9231 - RNA, 20 nt, synthetic construct
  misc_feature 1..20: note = spacer sequence
  source 1..20: mol_type = other RNA
aaataatttggaaaaccttt

SEQ ID NO: 9232 - RNA, 20 nt, synthetic construct
  misc_feature 1..20: note = spacer sequence
  source 1..20: mol_type = other RNA
aaattattttgatagctatt

SEQ ID NO: 9233 - RNA, 20 nt, synthetic construct
  misc_feature 1..20: note = spacer sequence
  source 1..20: mol_type = other RNA
tcaataaagtttgatcaagg

SEQ ID NO: 9234 - RNA, 20 nt, synthetic construct
  misc_feature 1..20: note = spacer sequence
  source 1..20: mol_type = other RNA
ataaagtttgatcaaggaaa

SEQ ID NO: 9235 - RNA, 20 nt, synthetic construct
  misc_feature 1..20: note = spacer sequence
  source 1..20: mol_type = other RNA
aactttattgaggatatttt

SEQ ID NO: 9236 - RNA, 20 nt, synthetic construct
  misc_feature 1..20: note = spacer sequence
  source 1..20: mol_type = other RNA
aggaaaagttacaacgacat

SEQ ID NO: 9237 - RNA, 20 nt, synthetic construct
  misc_feature 1..20: note = spacer sequence
  source 1..20: mol_type = other RNA
ttgatcaaactttattgagg

SEQ ID NO: 9238 - RNA, 20 nt, synthetic construct
  misc_feature 1..20: note = spacer sequence
  source 1..20: mol_type = other RNA
ttgtaacttttccttgatca

SEQ ID NO: 9239 - RNA, 20 nt, synthetic construct
  misc_feature 1..20: note = spacer sequence
  source 1..20: mol_type = other RNA
acattgtttaacaatttcca

SEQ ID NO: 9240 - RNA, 20 nt, synthetic construct
  misc_feature 1..20: note = spacer sequence
  source 1..20: mol_type = other RNA
atatgtacaatttccacgca

SEQ ID NO: 9241 - RNA, 20 nt, synthetic construct
  misc_feature 1..20: note = spacer sequence
  source 1..20: mol_type = other RNA
ttattattatgatactttat

SEQ ID NO: 9242 - RNA, 20 nt, synthetic construct
  misc_feature 1..20: note = spacer sequence
  source 1..20: mol_type = other RNA
aacatatttctgcatgtcag

SEQ ID NO: 9243 - RNA, 20 nt, synthetic construct
  misc_feature 1..20: note = spacer sequence
  source 1..20: mol_type = other RNA
gcatgtcagtttaaacacaa

SEQ ID NO: 9244 - RNA, 20 nt, synthetic construct
  misc_feature 1..20: note = spacer sequence
  source 1..20: mol_type = other RNA
gtttaaacacaaataaaact

SEQ ID NO: 9245 - RNA, 20 nt, synthetic construct
  misc_feature 1..20: note = spacer sequence
  source 1..20: mol_type = other RNA
tattttaataataggcattt

SEQ ID NO: 9246 - RNA, 20 nt, synthetic construct
  misc_feature 1..20: note = spacer sequence
  source 1..20: mol_type = other RNA
catgctcatattttaataat

SEQ ID NO: 9247 - RNA, 20 nt, synthetic construct
  misc_feature 1..20: note = spacer sequence
  source 1..20: mol_type = other RNA
ttgttttaattacagaaaaa

SEQ ID NO: 9248 - RNA, 20 nt, synthetic construct
  misc_feature 1..20: note = spacer sequence
  source 1..20: mol_type = other RNA
gtaattaaaacaaggatgcc

SEQ ID NO: 9249 - RNA, 20 nt, synthetic construct
  misc_feature 1..20: note = spacer sequence
  source 1..20: mol_type = other RNA
aaatagttacgtgttcaaca

SEQ ID NO: 9250 - RNA, 20 nt, synthetic construct
  misc_feature 1..20: note = spacer sequence
  source 1..20: mol_type = other RNA
acagcttttatcagagatat

SEQ ID NO: 9251 - RNA, 20 nt, synthetic construct
  misc_feature 1..20: note = spacer sequence
  source 1..20: mol_type = other RNA
ataatgaatagatctttctt

SEQ ID NO: 9252 - RNA, 20 nt, synthetic construct
  misc_feature 1..20: note = spacer sequence
  source 1..20: mol_type = other RNA
ttatagagcgtatggtttgc

SEQ ID NO: 9253 - RNA, 20 nt, synthetic construct
  misc_feature 1..20: note = spacer sequence
  source 1..20: mol_type = other RNA
attcattatagagcgtatgg

SEQ ID NO: 9254 - RNA, 20 nt, synthetic construct
  misc_feature 1..20: note = spacer sequence
  source 1..20: mol_type = other RNA
ttctttgaactgcaagaaaa

SEQ ID NO: 9255 - RNA, 20 nt, synthetic construct
  misc_feature 1..20: note = spacer sequence
  source 1..20: mol_type = other RNA
ttgaactgcaagaaaaatgc

SEQ ID NO: 9256 - RNA, 20 nt, synthetic construct
  misc_feature 1..20: note = spacer sequence
  source 1..20: mol_type = other RNA
aagaaagatctattcattat

SEQ ID NO: 9257 - RNA, 20 nt, synthetic construct
  misc_feature 1..20: note = spacer sequence
  source 1..20: mol_type = other RNA
tgcagttcaaagaaagatct

SEQ ID NO: 9258 - RNA, 20 nt, synthetic construct
  misc_feature 1..20: note = spacer sequence
  source 1..20: mol_type = other RNA
ggtacaagcatttttcttgc

SEQ ID NO: 9259 - RNA, 20 nt, synthetic construct
  misc_feature 1..20: note = spacer sequence
  source 1..20: mol_type = other RNA
aatgcaccatcaggtacaag

SEQ ID NO: 9260 - RNA, 20 nt, synthetic construct
  misc_feature 1..20: note = spacer sequence
  source 1..20: mol_type = other RNA
tgttgtattcccatcattcg

SEQ ID NO: 9261 - RNA, 20 nt, synthetic construct
  misc_feature 1..20: note = spacer sequence
  source 1..20: mol_type = other RNA
catcattcgtggctgaaact

SEQ ID NO: 9262 - RNA, 20 nt, synthetic construct
  misc_feature 1..20: note = spacer sequence
  source 1..20: mol_type = other RNA
ttcgtggctgaaactgatcc

SEQ ID NO: 9263 - RNA, 20 nt, synthetic construct
  misc_feature 1..20: note = spacer sequence
  source 1..20: mol_type = other RNA
tggctgaaactgatccatat

SEQ ID NO: 9264 - RNA, 20 nt, synthetic construct
  misc_feature 1..20: note = spacer sequence
  source 1..20: mol_type = other RNA
gccacgaatgatgggaatac

SEQ ID NO: 9265 - RNA, 20 nt, synthetic construct
  misc_feature 1..20: note = spacer sequence
  source 1..20: mol_type = other RNA
gtttcagccacgaatgatgg

SEQ ID NO: 9266 - RNA, 20 nt, synthetic construct
  misc_feature 1..20: note = spacer sequence
  source 1..20: mol_type = other RNA
atattttgatgctgtgtgta

SEQ ID NO: 9267 - RNA, 20 nt, synthetic construct
  misc_feature 1..20: note = spacer sequence
  source 1..20: mol_type = other RNA
aaatatggatcagtttcagc

SEQ ID NO: 9268 - RNA, 20 nt, synthetic construct
  misc_feature 1..20: note = spacer sequence
  source 1..20: mol_type = other RNA
ccaggaaagccactaaaaaa

SEQ ID NO: 9269 - RNA, 20 nt, synthetic construct
  misc_feature 1..20: note = spacer sequence
  source 1..20: mol_type = other RNA
aggaaagccactaaaaaaag

SEQ ID NO: 9270 - RNA, 20 nt, synthetic construct
  misc_feature 1..20: note = spacer sequence
  source 1..20: mol_type = other RNA
tggagatggcatgcagcagc

SEQ ID NO: 9271 - RNA, 20 nt, synthetic construct
  misc_feature 1..20: note = spacer sequence
  source 1..20: mol_type = other RNA
acctttttttagtggctttc

SEQ ID NO: 9272 - RNA, 20 nt, synthetic construct
  misc_feature 1..20: note = spacer sequence
  source 1..20: mol_type = other RNA
tttacccattcaaaagcaca

SEQ ID NO: 9273 - RNA, 20 nt, synthetic construct
  misc_feature 1..20: note = spacer sequence
  source 1..20: mol_type = other RNA
aaagcacaagcttctcagcc

SEQ ID NO: 9274 - RNA, 20 nt, synthetic construct
  misc_feature 1..20: note = spacer sequence
  source 1..20: mol_type = other RNA
gtaaaatgttaatgactcat

SEQ ID NO: 9275 - RNA, 20 nt, synthetic construct
  misc_feature 1..20: note = spacer sequence
  source 1..20: mol_type = other RNA
gtattattcccaacataaaa

SEQ ID NO: 9276 - RNA, 20 nt, synthetic construct
  misc_feature 1..20: note = spacer sequence
  source 1..20: mol_type = other RNA
caacataaaagccatttttt

SEQ ID NO: 9277 - RNA, 20 nt, synthetic construct
  misc_feature 1..20: note = spacer sequence
  source 1..20: mol_type = other RNA
tcattcaagagaaaactaat

SEQ ID NO: 9278 - RNA, 20 nt, synthetic construct
  misc_feature 1..20: note = spacer sequence
  source 1..20: mol_type = other RNA
ttcaagagaaaactaatacc

SEQ ID NO: 9279 - RNA, 20 nt, synthetic construct
  misc_feature 1..20: note = spacer sequence
  source 1..20: mol_type = other RNA
agagaaaactaataccacaa

SEQ ID NO: 9280 - RNA, 20 nt, synthetic construct
  misc_feature 1..20: note = spacer sequence
  source 1..20: mol_type = other RNA
tgaatgaggaagggatcctc

SEQ ID NO: 9281 - RNA, 20 nt, synthetic construct
  misc_feature 1..20: note = spacer sequence
  source 1..20: mol_type = other RNA
cttgaatgaggaagggatcc

SEQ ID NO: 9282 - RNA, 20 nt, synthetic construct
  misc_feature 1..20: note = spacer sequence
  source 1..20: mol_type = other RNA
tagaacattgttgtcattgc

SEQ ID NO: 9283 - RNA, 20 nt, synthetic construct
  misc_feature 1..20: note = spacer sequence
  source 1..20: mol_type = other RNA
atgaagttgttttgtaaaat

SEQ ID NO: 9284 - RNA, 20 nt, synthetic construct
  misc_feature 1..20: note = spacer sequence
  source 1..20: mol_type = other RNA
ttgctaaatgttacttaggt

SEQ ID NO: 9285 - RNA, 20 nt, synthetic construct
  misc_feature 1..20: note = spacer sequence
  source 1..20: mol_type = other RNA
atctgctgaggaataaaaaa

SEQ ID NO: 9286 - RNA, 20 nt, synthetic construct
  misc_feature 1..20: note = spacer sequence
  source 1..20: mol_type = other RNA
gctgaggaataaaaaaaaaa

SEQ ID NO: 9287 - RNA, 20 nt, synthetic construct
  misc_feature 1..20: note = spacer sequence
  source 1..20: mol_type = other RNA
gcagatagaaaattggtaat

SEQ ID NO: 9288 - RNA, 20 nt, synthetic construct
  misc_feature 1..20: note = spacer sequence
  source 1..20: mol_type = other RNA
tcagcagatagaaaattggt

SEQ ID NO: 9289 - RNA, 20 nt, synthetic construct
  misc_feature 1..20: note = spacer sequence
  source 1..20: mol_type = other RNA
acaggcaccattgttagttt

SEQ ID NO: 9290 - RNA, 20 nt, synthetic construct
  misc_feature 1..20: note = spacer sequence
  source 1..20: mol_type = other RNA
tccacaggcaccattgttag

SEQ ID NO: 9291 - RNA, 20 nt, synthetic construct
  misc_feature 1..20: note = spacer sequence
  source 1..20: mol_type = other RNA
tcctccacaggcaccattgt

SEQ ID NO: 9292 - RNA, 20 nt, synthetic construct
  misc_feature 1..20: note = spacer sequence
  source 1..20: mol_type = other RNA
tcctcctccacaggcaccat

SEQ ID NO: 9293 - RNA, 20 nt, synthetic construct
  misc_feature 1..20: note = spacer sequence
  source 1..20: mol_type = other RNA
cctcctcctccacaggcacc

SEQ ID NO: 9294 - RNA, 20 nt, synthetic construct
  misc_feature 1..20: note = spacer sequence
  source 1..20: mol_type = other RNA
tggtgacggcagtggtatcc

SEQ ID NO: 9295 - RNA, 20 nt, synthetic construct
  misc_feature 1..20: note = spacer sequence
  source 1..20: mol_type = other RNA
ccacgacagcacctgctgcc

SEQ ID NO: 9296 - RNA, 20 nt, synthetic construct
  misc_feature 1..20: note = spacer sequence
  source 1..20: mol_type = other RNA
tctttctttgattcttccac

SEQ ID NO: 9297 - RNA, 20 nt, synthetic construct
  misc_feature 1..20: note = spacer sequence
  source 1..20: mol_type = other RNA
ttctttgattcttccacagc

SEQ ID NO: 9298 - RNA, 20 nt, synthetic construct
  misc_feature 1..20: note = spacer sequence
  source 1..20: mol_type = other RNA
ttgattcttccacagcttct

SEQ ID NO: 9299 - RNA, 20 nt, synthetic construct
  misc_feature 1..20: note = spacer sequence
  source 1..20: mol_type = other RNA
aagaaagaggataccactgc

SEQ ID NO: 9300 - RNA, 20 nt, synthetic construct
  misc_feature 1..20: note = spacer sequence
  source 1..20: mol_type = other RNA
tccacagcttctggctcatc

SEQ ID NO: 9301 - RNA, 20 nt, synthetic construct
  misc_feature 1..20: note = spacer sequence
  source 1..20: mol_type = other RNA
acagcttctggctcatcatc

SEQ ID NO: 9302 - RNA, 20 nt, synthetic construct
  misc_feature 1..20: note = spacer sequence
  source 1..20: mol_type = other RNA
ggctcatcatcatagtcaaa

SEQ ID NO: 9303 - RNA, 20 nt, synthetic construct
  misc_feature 1..20: note = spacer sequence
  source 1..20: mol_type = other RNA
tcatcatagtcaaatctatc

SEQ ID NO: 9304 - RNA, 20 nt, synthetic construct
  misc_feature 1..20: note = spacer sequence
  source 1..20: mol_type = other RNA
tcatagtcaaatctatcaag

SEQ ID NO: 9305 - RNA, 20 nt, synthetic construct
  misc_feature 1..20: note = spacer sequence
  source 1..20: mol_type = other RNA
tagtcaaatctatcaagcaa

SEQ ID NO: 9306 - RNA, 20 nt, synthetic construct
  misc_feature 1..20: note = spacer sequence
  source 1..20: mol_type = other RNA
aatctatcaagcaacttctg

SEQ ID NO: 9307 - RNA, 20 nt, synthetic construct
  misc_feature 1..20: note = spacer sequence
  source 1..20: mol_type = other RNA
atcaagcaacttctggaata

SEQ ID NO: 9308 - RNA, 20 nt, synthetic construct
  misc_feature 1..20: note = spacer sequence
  source 1..20: mol_type = other RNA
agcaacttctggaataatta

SEQ ID NO: 9309 - RNA, 20 nt, synthetic construct
  misc_feature 1..20: note = spacer sequence
  source 1..20: mol_type = other RNA
ggaataattatgtcaatatt

SEQ ID NO: 9310 - RNA, 20 nt, synthetic construct
  misc_feature 1..20: note = spacer sequence
  source 1..20: mol_type = other RNA
agaagttgcttgatagattt

SEQ ID NO: 9311 - RNA, 20 nt, synthetic construct
  misc_feature 1..20: note = spacer sequence
  source 1..20: mol_type = other RNA
atatttcattttaaaattta

SEQ ID NO: 9312 - RNA, 20 nt, synthetic construct
  misc_feature 1..20: note = spacer sequence
  source 1..20: mol_type = other RNA
ttttaaaatttagactgatt

SEQ ID NO: 9313 - RNA, 20 nt, synthetic construct
  misc_feature 1..20: note = spacer sequence
  source 1..20: mol_type = other RNA
aaattttaaaatgaaatatt

SEQ ID NO: 9314 - RNA, 20 nt, synthetic construct
  misc_feature 1..20: note = spacer sequence
  source 1..20: mol_type = other RNA
gtctaaattttaaaatgaaa

SEQ ID NO: 9315 - RNA, 20 nt, synthetic construct
  misc_feature 1..20: note = spacer sequence
  source 1..20: mol_type = other RNA
ctgcacaaaaaactttatga

SEQ ID NO: 9316 - RNA, 20 nt, synthetic construct
  misc_feature 1..20: note = spacer sequence
  source 1..20: mol_type = other RNA
taaagttttttgtgcagtga

SEQ ID NO: 9317 - RNA, 20 nt, synthetic construct
  misc_feature 1..20: note = spacer sequence
  source 1..20: mol_type = other RNA
ttttgtacattttatgctga

SEQ ID NO: 9318 - RNA, 20 nt, synthetic construct
  misc_feature 1..20: note = spacer sequence
  source 1..20: mol_type = other RNA
tattcaatcaccataatgca

SEQ ID NO: 9319 - RNA, 20 nt, synthetic construct
  misc_feature 1..20: note = spacer sequence
  source 1..20: mol_type = other RNA
atcaccataatgcatataga

SEQ ID NO: 9320 - RNA, 20 nt, synthetic construct
  misc_feature 1..20: note = spacer sequence
  source 1..20: mol_type = other RNA
ccataatgcatatagaaaag

SEQ ID NO: 9321 - RNA, 20 nt, synthetic construct
  misc_feature 1..20: note = spacer sequence
  source 1..20: mol_type = other RNA
atatgcattatggtgattga

SEQ ID NO: 9322 - RNA, 20 nt, synthetic construct
  misc_feature 1..20: note = spacer sequence
  source 1..20: mol_type = other RNA
atatactgcttcctcaagaa

SEQ ID NO: 9323 - RNA, 20 nt, synthetic construct
  misc_feature 1..20: note = spacer sequence
  source 1..20: mol_type = other RNA
tcaagaatatactaatataa

SEQ ID NO: 9324 - RNA, 20 nt, synthetic construct
  misc_feature 1..20: note = spacer sequence
  source 1..20: mol_type = other RNA
agaatatactaatataaaaa

SEQ ID NO: 9325 - RNA, 20 nt, synthetic construct
  misc_feature 1..20: note = spacer sequence
  source 1..20: mol_type = other RNA
tgaggaagcagtatatggac

SEQ ID NO: 9326 - RNA, 20 nt, synthetic construct
  misc_feature 1..20: note = spacer sequence
  source 1..20: mol_type = other RNA
ttaaagtttgaagaatactg

SEQ ID NO: 9327 - RNA, 20 nt, synthetic construct
  misc_feature 1..20: note = spacer sequence
  source 1..20: mol_type = other RNA
aactttaaagaacatattaa

SEQ ID NO: 9328 - RNA, 20 nt, synthetic construct
  misc_feature 1..20: note = spacer sequence
  source 1..20: mol_type = other RNA
tcaaactttaaagaacatat

SEQ ID NO: 9329 - RNA, 20 nt, synthetic construct
  misc_feature 1..20: note = spacer sequence
  source 1..20: mol_type = other RNA
acccaaaaagaaattttagt

SEQ ID NO: 9330 - RNA, 20 nt, synthetic construct
  misc_feature 1..20: note = spacer sequence
  source 1..20: mol_type = other RNA
ttttgggtagaccccatttt

SEQ ID NO: 9331 - RNA, 20 nt, synthetic construct
  misc_feature 1..20: note = spacer sequence
  source 1..20: mol_type = other RNA
ctacttttttatacactaaa

SEQ ID NO: 9332 - RNA, 20 nt, synthetic construct
  misc_feature 1..20: note = spacer sequence
  source 1..20: mol_type = other RNA
ctcactacttttttatacac

SEQ ID NO: 9333 - RNA, 20 nt, synthetic construct
  misc_feature 1..20: note = spacer sequence
  source 1..20: mol_type = other RNA
ccctcactacttttttatac

SEQ ID NO: 9334 - RNA, 20 nt, synthetic construct
  misc_feature 1..20: note = spacer sequence
  source 1..20: mol_type = other RNA
aaaacataatggtttaacta

SEQ ID NO: 9335 - RNA, 20 nt, synthetic construct
  misc_feature 1..20: note = spacer sequence
  source 1..20: mol_type = other RNA
tcaaccatattctaaaacag

SEQ ID NO: 9336 - RNA, 20 nt, synthetic construct
  misc_feature 1..20: note = spacer sequence
  source 1..20: mol_type = other RNA
accatattctaaaacagatt

SEQ ID NO: 9337 - RNA, 20 nt, synthetic construct
  misc_feature 1..20: note = spacer sequence
  source 1..20: mol_type = other RNA
aaaacagattccagagggac

SEQ ID NO: 9338 - RNA, 20 nt, synthetic construct
  misc_feature 1..20: note = spacer sequence
  source 1..20: mol_type = other RNA
gtcatcactcataaatcact

SEQ ID NO: 9339 - RNA, 20 nt, synthetic construct
  misc_feature 1..20: note = spacer sequence
  source 1..20: mol_type = other RNA
tcactcataaatcactaaga

SEQ ID NO: 9340 - RNA, 20 nt, synthetic construct
  misc_feature 1..20: note = spacer sequence
  source 1..20: mol_type = other RNA
ctcataaatcactaagatat

SEQ ID NO: 9341 - RNA, 20 nt, synthetic construct
  misc_feature 1..20: note = spacer sequence
  source 1..20: mol_type = other RNA
taaatcactaagatataatg

SEQ ID NO: 9342 - RNA, 20 nt, synthetic construct
  misc_feature 1..20: note = spacer sequence
  source 1..20: mol_type = other RNA
ctaagatataatgaaaactg

SEQ ID NO: 9343 - RNA, 20 nt, synthetic construct
  misc_feature 1..20: note = spacer sequence
  source 1..20: mol_type = other RNA
tagtgatttatgagtgatga

SEQ ID NO: 9344 - RNA, 20 nt, synthetic construct
  misc_feature 1..20: note = spacer sequence
  source 1..20: mol_type = other RNA
ttatatcttagtgatttatg

SEQ ID NO: 9345 - RNA, 20 nt, synthetic construct
  misc_feature 1..20: note = spacer sequence
  source 1..20: mol_type = other RNA
acctagtaaataccagtttt

SEQ ID NO: 9346 - RNA, 20 nt, synthetic construct
  misc_feature 1..20: note = spacer sequence
  source 1..20: mol_type = other RNA
aaattaaaaatccacctagt

SEQ ID NO: 9347 - RNA, 20 nt, synthetic construct
  misc_feature 1..20: note = spacer sequence
  source 1..20: mol_type = other RNA
taactataaaaacagaagga

SEQ ID NO: 9348 - RNA, 20 nt, synthetic construct
  misc_feature 1..20: note = spacer sequence
  source 1..20: mol_type = other RNA
aacatcctaactataaaaac

SEQ ID NO: 9349 - RNA, 20 nt, synthetic construct
  misc_feature 1..20: note = spacer sequence
  source 1..20: mol_type = other RNA
ttccaacatcctaactataa

SEQ ID NO: 9350 - RNA, 20 nt, synthetic construct
  misc_feature 1..20: note = spacer sequence
  source 1..20: mol_type = other RNA
gatattttaaagatgatgaa

SEQ ID NO: 9351 - RNA, 20 nt, synthetic construct
  misc_feature 1..20: note = spacer sequence
  source 1..20: mol_type = other RNA
gattctttccaacatcctaa

SEQ ID NO: 9352 - RNA, 20 nt, synthetic construct
  misc_feature 1..20: note = spacer sequence
  source 1..20: mol_type = other RNA
ttaaaatatctgattctttc

SEQ ID NO: 9353 - RNA, 20 nt, synthetic construct
  misc_feature 1..20: note = spacer sequence
  source 1..20: mol_type = other RNA
tctttaaaatatctgattct

SEQ ID NO: 9354 - RNA, 20 nt, synthetic construct
  misc_feature 1..20: note = spacer sequence
  source 1..20: mol_type = other RNA
tcatctttaaaatatctgat

SEQ ID NO: 9355 - RNA, 20 nt, synthetic construct
  misc_feature 1..20: note = spacer sequence
  source 1..20: mol_type = other RNA
gttctgattttcaaactttt

SEQ ID NO: 9356 - RNA, 20 nt, synthetic construct
  misc_feature 1..20: note = spacer sequence
  source 1..20: mol_type = other RNA
gattttcaaacttttgagtt

SEQ ID NO: 9357 - RNA, 20 nt, synthetic construct
  misc_feature 1..20: note = spacer sequence
  source 1..20: mol_type = other RNA
gaactgatgcctttggtttc

SEQ ID NO: 9358 - RNA, 20 nt, synthetic construct
  misc_feature 1..20: note = spacer sequence
  source 1..20: mol_type = other RNA
aacttttgagtttttttgca

SEQ ID NO: 9359 - RNA, 20 nt, synthetic construct
  misc_feature 1..20: note = spacer sequence
  source 1..20: mol_type = other RNA
tcttttttgttgttgcttgt

SEQ ID NO: 9360 - RNA, 20 nt, synthetic construct
  misc_feature 1..20: note = spacer sequence
  source 1..20: mol_type = other RNA
tttttgttgttgcttgtttt

SEQ ID NO: 9361 - RNA, 20 nt, synthetic construct
  misc_feature 1..20: note = spacer sequence
  source 1..20: mol_type = other RNA
aaaaaacaagcaacaacaaa

SEQ ID NO: 9362 - RNA, 20 nt, synthetic construct
  misc_feature 1..20: note = spacer sequence
  source 1..20: mol_type = other RNA
ctaaaaaacaagcaacaaca

SEQ ID NO: 9363 - RNA, 20 nt, synthetic construct
  misc_feature 1..20: note = spacer sequence
  source 1..20: mol_type = other RNA
tgtctctaaaaaacaagcaa

SEQ ID NO: 9364 - RNA, 20 nt, synthetic construct
  misc_feature 1..20: note = spacer sequence
  source 1..20: mol_type = other RNA
cattctgttgcccaggctag

SEQ ID NO: 9365 - RNA, 20 nt, synthetic construct
  misc_feature 1..20: note = spacer sequence
  source 1..20: mol_type = other RNA
ttctgttgcccaggctagtg

SEQ ID NO: 9366 - RNA, 20 nt, synthetic construct
  misc_feature 1..20: note = spacer sequence
  source 1..20: mol_type = other RNA
gttgcccaggctagtggcac

SEQ ID NO: 9367 - RNA, 20 nt, synthetic construct
  misc_feature 1..20: note = spacer sequence
  source 1..20: mol_type = other RNA
tggcttactgcagctttgaa

SEQ ID NO: 9368 - RNA, 20 nt, synthetic construct
  misc_feature 1..20: note = spacer sequence
  source 1..20: mol_type = other RNA
aagctgcagtaagccatgat

SEQ ID NO: 9369 - RNA, 20 nt, synthetic construct
  misc_feature 1..20: note = spacer sequence
  source 1..20: mol_type = other RNA
tggggccaagcaacccaccc

SEQ ID NO: 9370 - RNA, 20 nt, synthetic construct
  misc_feature 1..20: note = spacer sequence
  source 1..20: mol_type = other RNA
gcatcctgggtagctagggc

SEQ ID NO: 9371 - RNA, 20 nt, synthetic construct
  misc_feature 1..20: note = spacer sequence
  source 1..20: mol_type = other RNA
tgggtagctagggctacagg

SEQ ID NO: 9372 - RNA, 20 nt, synthetic construct
  misc_feature 1..20: note = spacer sequence
  source 1..20: mol_type = other RNA
attaaagaaaagcatgtatc

SEQ ID NO: 9373 - RNA, 20 nt, synthetic construct
  misc_feature 1..20: note = spacer sequence
  source 1..20: mol_type = other RNA
ttaattgagtataatacata

SEQ ID NO: 9374 - RNA, 20 nt, synthetic construct
  misc_feature 1..20: note = spacer sequence
  source 1..20: mol_type = other RNA
gtaggaaattaattctgaaa

SEQ ID NO: 9375 - RNA, 20 nt, synthetic construct
  misc_feature 1..20: note = spacer sequence
  source 1..20: mol_type = other RNA
tacagatacatgcttttctt

SEQ ID NO: 9376 - RNA, 20 nt, synthetic construct
  misc_feature 1..20: note = spacer sequence
  source 1..20: mol_type = other RNA
gaaaagatgtaaggcaaaat

SEQ ID NO: 9377 - RNA, 20 nt, synthetic construct
  misc_feature 1..20: note = spacer sequence
  source 1..20: mol_type = other RNA
gaattaatttcctacagata

SEQ ID NO: 9378 - RNA, 20 nt, synthetic construct
  misc_feature 1..20: note = spacer sequence
  source 1..20: mol_type = other RNA
tttcagaattaatttcctac

SEQ ID NO: 9379 - RNA, 20 nt, synthetic construct
  misc_feature 1..20: note = spacer sequence
  source 1..20: mol_type = other RNA
tttttttttttttttcactt

SEQ ID NO: 9380 - RNA, 20 nt, synthetic construct
  misc_feature 1..20: note = spacer sequence
  source 1..20: mol_type = other RNA
cttttttaattttacactag

SEQ ID NO: 9381 - RNA, 20 nt, synthetic construct
  misc_feature 1..20: note = spacer sequence
  source 1..20: mol_type = other RNA
gcttcaaaccctggaaattt

SEQ ID NO: 9382 - RNA, 20 nt, synthetic construct
  misc_feature 1..20: note = spacer sequence
  source 1..20: mol_type = other RNA
aaccctggaaatttttgcac

SEQ ID NO: 9383 - RNA, 20 nt, synthetic construct
  misc_feature 1..20: note = spacer sequence
  source 1..20: mol_type = other RNA
agggtttgaagctgaattta

SEQ ID NO: 9384 - RNA, 20 nt, synthetic construct
  misc_feature 1..20: note = spacer sequence
  source 1..20: mol_type = other RNA
gtgcaaaaatttccagggtt

SEQ ID NO: 9385 - RNA, 20 nt, synthetic construct
  misc_feature 1..20: note = spacer sequence
  source 1..20: mol_type = other RNA
catttaaaaccagggaaaat

SEQ ID NO: 9386 - RNA, 20 nt, synthetic construct
  misc_feature 1..20: note = spacer sequence
  source 1..20: mol_type = other RNA
ctggttttaaatgtgatatg

SEQ ID NO: 9387 - RNA, 20 nt, synthetic construct
  misc_feature 1..20: note = spacer sequence
  source 1..20: mol_type = other RNA
atgttttcttgttgaggggg

SEQ ID NO: 9388 - RNA, 20 nt, synthetic construct
  misc_feature 1..20: note = spacer sequence
  source 1..20: mol_type = other RNA
attattttccctggttttaa

SEQ ID NO: 9389 - RNA, 20 nt, synthetic construct
  misc_feature 1..20: note = spacer sequence
  source 1..20: mol_type = other RNA
tgttgagggggaaaatctct

SEQ ID NO: 9390 - RNA, 20 nt, synthetic construct
  misc_feature 1..20: note = spacer sequence
  source 1..20: mol_type = other RNA
acaagaaaacatcgattatt

SEQ ID NO: 9391 - RNA, 20 nt, synthetic construct
  misc_feature 1..20: note = spacer sequence
  source 1..20: mol_type = other RNA
ccctcaacaagaaaacatcg

SEQ ID NO: 9392 - RNA, 20 nt, synthetic construct
  misc_feature 1..20: note = spacer sequence
  source 1..20: mol_type = other RNA
ctcaaattacaaaacgacat

SEQ ID NO: 9393 - RNA, 20 nt, synthetic construct
  misc_feature 1..20: note = spacer sequence
  source 1..20: mol_type = other RNA
caaattacaaaacgacataa

SEQ ID NO: 9394 - RNA, 20 nt, synthetic construct
  misc_feature 1..20: note = spacer sequence
  source 1..20: mol_type = other RNA
ataactcaagttgagtgata

SEQ ID NO: 9395 - RNA, 20 nt, synthetic construct
  misc_feature 1..20: note = spacer sequence
  source 1..20: mol_type = other RNA
agttgagtgatataaatggt

SEQ ID NO: 9396 - RNA, 20 nt, synthetic construct
  misc_feature 1..20: note = spacer sequence
  source 1..20: mol_type = other RNA
acttgagttatggaaattat

SEQ ID NO: 9397 - RNA, 20 nt, synthetic construct
  misc_feature 1..20: note = spacer sequence
  source 1..20: mol_type = other RNA
ctcaacttgagttatggaaa

SEQ ID NO: 9398 - RNA, 20 nt, synthetic construct
  misc_feature 1..20: note = spacer sequence
  source 1..20: mol_type = other RNA
cataacccaccccaccattt

SEQ ID NO: 9399 - RNA, 20 nt, synthetic construct
  misc_feature 1..20: note = spacer sequence
  source 1..20: mol_type = other RNA
cacataacccaccccaccat

SEQ ID NO: 9400 - RNA, 20 nt, synthetic construct
  misc_feature 1..20: note = spacer sequence
  source 1..20: mol_type = other RNA
ctcacataacccaccccacc

SEQ ID NO: 9401 - RNA, 20 nt, synthetic construct
  misc_feature 1..20: note = spacer sequence
  source 1..20: mol_type = other RNA
aatgcagttttctgttcagg

SEQ ID NO: 9402 - RNA, 20 nt, synthetic construct
  misc_feature 1..20: note = spacer sequence
  source 1..20: mol_type = other RNA
gttcaggtggggggaaagca

SEQ ID NO: 9403 - RNA, 20 nt, synthetic construct
  misc_feature 1..20: note = spacer sequence
  source 1..20: mol_type = other RNA
ggtggggggaaagcagcttt

SEQ ID NO: 9404 - RNA, 20 nt, synthetic construct
  misc_feature 1..20: note = spacer sequence
  source 1..20: mol_type = other RNA
ccccacctgaacagaaaact

SEQ ID NO: 9405 - RNA, 20 nt, synthetic construct
  misc_feature 1..20: note = spacer sequence
  source 1..20: mol_type = other RNA
gatggttgtgtaggagttgt

SEQ ID NO: 9406 - RNA, 20 nt, synthetic construct
  misc_feature 1..20: note = spacer sequence
  source 1..20: mol_type = other RNA
gaacaaaaagctgctttccc

SEQ ID NO: 9407 - RNA, 20 nt, synthetic construct
  misc_feature 1..20: note = spacer sequence
  source 1..20: mol_type = other RNA
tacacaaccatctgaacaaa

SEQ ID NO: 9408 - RNA, 20 nt, synthetic construct
  misc_feature 1..20: note = spacer sequence
  source 1..20: mol_type = other RNA
ttaactgagctgtgatagcc

SEQ ID NO: 9409 - RNA, 20 nt, synthetic construct
  misc_feature 1..20: note = spacer sequence
  source 1..20: mol_type = other RNA
gttaaagacaactcctacac

SEQ ID NO: 9410 - RNA, 20 nt, synthetic construct
  misc_feature 1..20: note = spacer sequence
  source 1..20: mol_type = other RNA
cagctcagttaaagacaact

SEQ ID NO: 9411 - RNA, 20 nt, synthetic construct
  misc_feature 1..20: note = spacer sequence
  source 1..20: mol_type = other RNA
ggctatcacagctcagttaa

SEQ ID NO: 9412 - RNA, 20 nt, synthetic construct
  misc_feature 1..20: note = spacer sequence
  source 1..20: mol_type = other RNA
ggttcaggctatcacagctc

SEQ ID NO: 9413 - RNA, 20 nt, synthetic construct
  misc_feature 1..20: note = spacer sequence
  source 1..20: mol_type = other RNA
cagcattgtcaagggcagga

SEQ ID NO: 9414 - RNA, 20 nt, synthetic construct
  misc_feature 1..20: note = spacer sequence
  source 1..20: mol_type = other RNA
agggcaggagactgtggttt

SEQ ID NO: 9415 - RNA, 20 nt, synthetic construct
  misc_feature 1..20: note = spacer sequence
  source 1..20: mol_type = other RNA
tgcccttgacaatgctgtga

SEQ ID NO: 9416 - RNA, 20 nt, synthetic construct
  misc_feature 1..20: note = spacer sequence
  source 1..20: mol_type = other RNA
cctgcccttgacaatgctgt

SEQ ID NO: 9417 - RNA, 20 nt, synthetic construct
  misc_feature 1..20: note = spacer sequence
  source 1..20: mol_type = other RNA
aaaaccacagtctcctgccc

SEQ ID NO: 9418 - RNA, 20 nt, synthetic construct
  misc_feature 1..20: note = spacer sequence
  source 1..20: mol_type = other RNA
acagcctccaaaaccacagt

SEQ ID NO: 9419 - RNA, 20 nt, synthetic construct
  misc_feature 1..20: note = spacer sequence
  source 1..20: mol_type = other RNA
gaaggatctgctgaagctta

SEQ ID NO: 9420 - RNA, 20 nt, synthetic construct
  misc_feature 1..20: note = spacer sequence
  source 1..20: mol_type = other RNA
gacttttcaacagcctccaa

SEQ ID NO: 9421 - RNA, 20 nt, synthetic construct
  misc_feature 1..20: note = spacer sequence
  source 1..20: mol_type = other RNA
ttcagacttttcaacagcct

SEQ ID NO: 9422 - RNA, 20 nt, synthetic construct
  misc_feature 1..20: note = spacer sequence
  source 1..20: mol_type = other RNA
gctgaagcttaaagaatggg

SEQ ID NO: 9423 - RNA, 20 nt, synthetic construct
  misc_feature 1..20: note = spacer sequence
  source 1..20: mol_type = other RNA
gcagatccttcagacttttc

SEQ ID NO: 9424 - RNA, 20 nt, synthetic construct
  misc_feature 1..20: note = spacer sequence
  source 1..20: mol_type = other RNA
ttaagcttcagcagatcctt

SEQ ID NO: 9425 - RNA, 20 nt, synthetic construct
  misc_feature 1..20: note = spacer sequence
  source 1..20: mol_type = other RNA
cattctttaagcttcagcag

SEQ ID NO: 9426 - RNA, 20 nt, synthetic construct
  misc_feature 1..20: note = spacer sequence
  source 1..20: mol_type = other RNA
cagaacaaagtataatcata

SEQ ID NO: 9427 - RNA, 20 nt, synthetic construct
  misc_feature 1..20: note = spacer sequence
  source 1..20: mol_type = other RNA
gtgatttattggttttccca

SEQ ID NO: 9428 - RNA, 20 nt, synthetic construct
  misc_feature 1..20: note = spacer sequence
  source 1..20: mol_type = other RNA
tactatcaaaagttaattta

SEQ ID NO: 9429 - RNA, 20 nt, synthetic construct
  misc_feature 1..20: note = spacer sequence
  source 1..20: mol_type = other RNA
aaagttaatttaataaaaaa

SEQ ID NO: 9430 - RNA, 20 nt, synthetic construct
  misc_feature 1..20: note = spacer sequence
  source 1..20: mol_type = other RNA
taaaggtgattcaaagtagc

SEQ ID NO: 9431 - RNA, 20 nt, synthetic construct
  misc_feature 1..20: note = spacer sequence
  source 1..20: mol_type = other RNA
cctttaagacatttttttat

SEQ ID NO: 9432 - RNA, 20 nt, synthetic construct
  misc_feature 1..20: note = spacer sequence
  source 1..20: mol_type = other RNA
aagtagcataggcacagaac

SEQ ID NO: 9433 - RNA, 20 nt, synthetic construct
  misc_feature 1..20: note = spacer sequence
  source 1..20: mol_type = other RNA
gtgcctatgctactttgaat

SEQ ID NO: 9434 - RNA, 20 nt, synthetic construct
  misc_feature 1..20: note = spacer sequence
  source 1..20: mol_type = other RNA
ccaatttgttctgtgcctat

SEQ ID NO: 9435 - RNA, 20 nt, synthetic construct
  misc_feature 1..20: note = spacer sequence
  source 1..20: mol_type = other RNA
ttttatgaatggttaaattt

SEQ ID NO: 9436 - RNA, 20 nt, synthetic construct
  misc_feature 1..20: note = spacer sequence
  source 1..20: mol_type = other RNA
taaaaggattttttccccaa

SEQ ID NO: 9437 - RNA, 20 nt, synthetic construct
  misc_feature 1..20: note = spacer sequence
  source 1..20: mol_type = other RNA
gcatacatttttaaccttaa

SEQ ID NO: 9438 - RNA, 20 nt, synthetic construct
  misc_feature 1..20: note = spacer sequence
  source 1..20: mol_type = other RNA
atgatatgatggtcaaaaaa

SEQ ID NO: 9439 - RNA, 20 nt, synthetic construct
  misc_feature 1..20: note = spacer sequence
  source 1..20: mol_type = other RNA
ttgacattgtcagcatacat

SEQ ID NO: 9440 - RNA, 20 nt, synthetic construct
  misc_feature 1..20: note = spacer sequence
  source 1..20: mol_type = other RNA
tatcattgacattgtcagca

SEQ ID NO: 9441 - RNA, 20 nt, synthetic construct
  misc_feature 1..20: note = spacer sequence
  source 1..20: mol_type = other RNA
aaaaaagagaaaatacactg

SEQ ID NO: 9442 - RNA, 20 nt, synthetic construct
  misc_feature 1..20: note = spacer sequence
  source 1..20: mol_type = other RNA
ttttttgaccatcatatcat

SEQ ID NO: 9443 - RNA, 20 nt, synthetic construct
  misc_feature 1..20: note = spacer sequence
  source 1..20: mol_type = other RNA
ctttttttgaccatcatatc

SEQ ID NO: 9444 - RNA, 20 nt, synthetic construct
  misc_feature 1..20: note = spacer sequence
  source 1..20: mol_type = other RNA
gtgtattttctctttttttg

SEQ ID NO: 9445 - RNA, 20 nt, synthetic construct
  misc_feature 1..20: note = spacer sequence
  source 1..20: mol_type = other RNA
caattcagtgtattttctct

SEQ ID NO: 9446 - RNA, 20 nt, synthetic construct
  misc_feature 1..20: note = spacer sequence
  source 1..20: mol_type = other RNA
tgcaaacaatttcacttttg

SEQ ID NO: 9447 - RNA, 20 nt, synthetic construct
  misc_feature 1..20: note = spacer sequence
  source 1..20: mol_type = other RNA
cttttgagtagacagtttac

SEQ ID NO: 9448 - RNA, 20 nt, synthetic construct
  misc_feature 1..20: note = spacer sequence
  source 1..20: mol_type = other RNA
aaagtgaaattgtttgcagg

SEQ ID NO: 9449 - RNA, 20 nt, synthetic construct
  misc_feature 1..20: note = spacer sequence
  source 1..20: mol_type = other RNA
actcaaaagtgaaattgttt

SEQ ID NO: 9450 - RNA, 20 nt, synthetic construct
  misc_feature 1..20: note = spacer sequence
  source 1..20: mol_type = other RNA
aggccaacaggtaaactgtc

SEQ ID NO: 9451 - RNA, 20 nt, synthetic construct
  misc_feature 1..20: note = spacer sequence
  source 1..20: mol_type = other RNA
gaaacagctgagccacagca

SEQ ID NO: 9452 - RNA, 20 nt, synthetic construct
  misc_feature 1..20: note = spacer sequence
  source 1..20: mol_type = other RNA
gacaactcaaggccaacagg

SEQ ID NO: 9453 - RNA, 20 nt, synthetic construct
  misc_feature 1..20: note = spacer sequence
  source 1..20: mol_type = other RNA
gctgtttcagacaactcaag

SEQ ID NO: 9454 - RNA, 20 nt, synthetic construct
  misc_feature 1..20: note = spacer sequence
  source 1..20: mol_type = other RNA
gagctgggcaactgtggtac

SEQ ID NO: 9455 - RNA, 20 nt, synthetic construct
  misc_feature 1..20: note = spacer sequence
  source 1..20: mol_type = other RNA
gatgcttttgctgctgtggc

SEQ ID NO: 9456 - RNA, 20 nt, synthetic construct
  misc_feature 1..20: note = spacer sequence
  source 1..20: mol_type = other RNA
cagctgtaccacagttgccc

SEQ ID NO: 9457 - RNA, 20 nt, synthetic construct
  misc_feature 1..20: note = spacer sequence
  source 1..20: mol_type = other RNA
gtcccagctgtaccacagtt

SEQ ID NO: 9458 - RNA, 20 nt, synthetic construct
  misc_feature 1..20: note = spacer sequence
  source 1..20: mol_type = other RNA
aaactccgtcccagctgtac

SEQ ID NO: 9459 - RNA, 20 nt, synthetic construct
  misc_feature 1..20: note = spacer sequence
  source 1..20: mol_type = other RNA
cacacaagccactccaaact

SEQ ID NO: 9460 - RNA, 20 nt, synthetic construct
  misc_feature 1..20: note = spacer sequence
  source 1..20: mol_type = other RNA
gaagaaacttttactggagg

SEQ ID NO: 9461 - RNA, 20 nt, synthetic construct
  misc_feature 1..20: note = spacer sequence
  source 1..20: mol_type = other RNA
gaacctcccacacaagccac

SEQ ID NO: 9462 - RNA, 20 nt, synthetic construct
  misc_feature 1..20: note = spacer sequence
  source 1..20: mol_type = other RNA
tctgaacctcccacacaagc

SEQ ID NO: 9463 - RNA, 20 nt, synthetic construct
  misc_feature 1..20: note = spacer sequence
  source 1..20: mol_type = other RNA
agtaaaagtttcttctgaac

SEQ ID NO: 9464 - RNA, 20 nt, synthetic construct
  misc_feature 1..20: note = spacer sequence
  source 1..20: mol_type = other RNA
acctccagtaaaagtttctt

SEQ ID NO: 9465 - RNA, 20 nt, synthetic construct
  misc_feature 1..20: note = spacer sequence
  source 1..20: mol_type = other RNA
cctccacctccagtaaaagt

SEQ ID NO: 9466 - RNA, 20 nt, synthetic construct
  misc_feature 1..20: note = spacer sequence
  source 1..20: mol_type = other RNA
tttttaggctcacctccacc

SEQ ID NO: 9467 - RNA, 20 nt, synthetic construct
  misc_feature 1..20: note = spacer sequence
  source 1..20: mol_type = other RNA
cacaatggtatgattttttg

SEQ ID NO: 9468 - RNA, 20 nt, synthetic construct
  misc_feature 1..20: note = spacer sequence
  source 1..20: mol_type = other RNA
cagatacatctgaccatacc

SEQ ID NO: 9469 - RNA, 20 nt, synthetic construct
  misc_feature 1..20: note = spacer sequence
  source 1..20: mol_type = other RNA
gtgagctcacacaatggtat

SEQ ID NO: 9470 - RNA, 20 nt, synthetic construct
  misc_feature 1..20: note = spacer sequence
  source 1..20: mol_type = other RNA
gaccataccttcattattgg

SEQ ID NO: 9471 - RNA, 20 nt, synthetic construct
  misc_feature 1..20: note = spacer sequence
  source 1..20: mol_type = other RNA
gatgtatctgtgagctcaca

SEQ ID NO: 9472 - RNA, 20 nt, synthetic construct
  misc_feature 1..20: note = spacer sequence
  source 1..20: mol_type = other RNA
ttattggtaacattttctgc

SEQ ID NO: 9473 - RNA, 20 nt, synthetic construct
  misc_feature 1..20: note = spacer sequence
  source 1..20: mol_type = other RNA
gctactggggctgcattact

SEQ ID NO: 9474 - RNA, 20 nt, synthetic construct
  misc_feature 1..20: note = spacer sequence
  source 1..20: mol_type = other RNA
cgctgccatgtccaaaagag

SEQ ID NO: 9475 - RNA, 20 nt, synthetic construct
  misc_feature 1..20: note = spacer sequence
  source 1..20: mol_type = other RNA
aaaagaggttgaataatttc

SEQ ID NO: 9476 - RNA, 20 nt, synthetic construct
  misc_feature 1..20: note = spacer sequence
  source 1..20: mol_type = other RNA
tttggacatggcagcgggaa

SEQ ID NO: 9477 - RNA, 20 nt, synthetic construct
  misc_feature 1..20: note = spacer sequence
  source 1..20: mol_type = other RNA
acctcttttggacatggcag

SEQ ID NO: 9478 - RNA, 20 nt, synthetic construct
  misc_feature 1..20: note = spacer sequence
  source 1..20: mol_type = other RNA
attttgaacactccattttt

SEQ ID NO: 9479 - RNA, 20 nt, synthetic construct
  misc_feature 1..20: note = spacer sequence
  source 1..20: mol_type = other RNA
aaattgaaattattcaacct

SEQ ID NO: 9480 - RNA, 20 nt, synthetic construct
  misc_feature 1..20: note = spacer sequence
  source 1..20: mol_type = other RNA
atttttttgccaaaggttca

SEQ ID NO: 9481 - RNA, 20 nt, synthetic construct
  misc_feature 1..20: note = spacer sequence
  source 1..20: mol_type = other RNA
gcacacgaactattttactc

SEQ ID NO: 9482 - RNA, 20 nt, synthetic construct
  misc_feature 1..20: note = spacer sequence
  source 1..20: mol_type = other RNA
tgtgctgaacctttggcaaa

SEQ ID NO: 9483 - RNA, 20 nt, synthetic construct
  misc_feature 1..20: note = spacer sequence
  source 1..20: mol_type = other RNA
gttacgcatgagaaacacaa

SEQ ID NO: 9484 - RNA, 20 nt, synthetic construct
  misc_feature 1..20: note = spacer sequence
  source 1..20: mol_type = other RNA
tgcgtaacagagtaaaatag

SEQ ID NO: 9485 - RNA, 20 nt, synthetic construct
  misc_feature 1..20: note = spacer sequence
  source 1..20: mol_type = other RNA
catgcgtaacagagtaaaat

SEQ ID NO: 9486 - RNA, 20 nt, synthetic construct
  misc_feature 1..20: note = spacer sequence
  source 1..20: mol_type = other RNA
gttatttatgcaaatattta

SEQ ID NO: 9487 - RNA, 20 nt, synthetic construct
  misc_feature 1..20: note = spacer sequence
  source 1..20: mol_type = other RNA
tatgagttcttcaggattat

SEQ ID NO: 9488 - RNA, 20 nt, synthetic construct
  misc_feature 1..20: note = spacer sequence
  source 1..20: mol_type = other RNA
tgtttattttcttatgagtt

SEQ ID NO: 9489 - RNA, 20 nt, synthetic construct
  misc_feature 1..20: note = spacer sequence
  source 1..20: mol_type = other RNA
tttcgtgtttattttcttat

SEQ ID NO: 9490 - RNA, 20 nt, synthetic construct
  misc_feature 1..20: note = spacer sequence
  source 1..20: mol_type = other RNA
gtggtcatttcgtgtttatt

SEQ ID NO: 9491 - RNA, 20 nt, synthetic construct
  misc_feature 1..20: note = spacer sequence
  source 1..20: mol_type = other RNA
tcagtggtcatttcgtgttt

SEQ ID NO: 9492 - RNA, 20 nt, synthetic construct
  misc_feature 1..20: note = spacer sequence
  source 1..20: mol_type = other RNA
agctcacagacatcgctaca

SEQ ID NO: 9493 - RNA, 20 nt, synthetic construct
  misc_feature 1..20: note = spacer sequence
  source 1..20: mol_type = other RNA
cagacatcgctacatgaaaa

SEQ ID NO: 9494 - RNA, 20 nt, synthetic construct
  misc_feature 1..20: note = spacer sequence
  source 1..20: mol_type = other RNA
gtgagcttgaaacaaaacag

SEQ ID NO: 9495 - RNA, 20 nt, synthetic construct
  misc_feature 1..20: note = spacer sequence
  source 1..20: mol_type = other RNA
ctacatgaaaatcttatctg

SEQ ID NO: 9496 - RNA, 20 nt, synthetic construct
  misc_feature 1..20: note = spacer sequence
  source 1..20: mol_type = other RNA
tgtagcgatgtctgtgagct

SEQ ID NO: 9497 - RNA, 20 nt, synthetic construct
  misc_feature 1..20: note = spacer sequence
  source 1..20: mol_type = other RNA
tatctggtaatatagtaggc

SEQ ID NO: 9498 - RNA, 20 nt, synthetic construct
  misc_feature 1..20: note = spacer sequence
  source 1..20: mol_type = other RNA
ttaaaaaatattattttaaa

SEQ ID NO: 9499 - RNA, 20 nt, synthetic construct
  misc_feature 1..20: note = spacer sequence
  source 1..20: mol_type = other RNA
tcagatggacaaagatataa

SEQ ID NO: 9500 - RNA, 20 nt, synthetic construct
  misc_feature 1..20: note = spacer sequence
  source 1..20: mol_type = other RNA
gatggacaaagatataaata

SEQ ID NO: 9501 - RNA, 20 nt, synthetic construct
  misc_feature 1..20: note = spacer sequence
  source 1..20: mol_type = other RNA
gaagataaggtataattaat

SEQ ID NO: 9502 - RNA, 20 nt, synthetic construct
  misc_feature 1..20: note = spacer sequence
  source 1..20: mol_type = other RNA
atctgaagataaggtataat

SEQ ID NO: 9503 - RNA, 20 nt, synthetic construct
  misc_feature 1..20: note = spacer sequence
  source 1..20: mol_type = other RNA
ttgtccatctgaagataagg

SEQ ID NO: 9504 - RNA, 20 nt, synthetic construct
  misc_feature 1..20: note = spacer sequence
  source 1..20: mol_type = other RNA
aatatttatatctttgtcca

SEQ ID NO: 9505 - RNA, 20 nt, synthetic construct
  misc_feature 1..20: note = spacer sequence
  source 1..20: mol_type = other RNA
aaaaacataactgccacatt

SEQ ID NO: 9506 - RNA, 20 nt, synthetic construct
  misc_feature 1..20: note = spacer sequence
  source 1..20: mol_type = other RNA
ctaaaaacataactgccaca

SEQ ID NO: 9507 - RNA, 20 nt, synthetic construct
  misc_feature 1..20: note = spacer sequence
  source 1..20: mol_type = other RNA
tggcccaaaaacatctttat

SEQ ID NO: 9508 - RNA, 20 nt, synthetic construct
  misc_feature 1..20: note = spacer sequence
  source 1..20: mol_type = other RNA
ttatcagttccaaactgatg

SEQ ID NO: 9509 - RNA, 20 nt, synthetic construct
  misc_feature 1..20: note = spacer sequence
  source 1..20: mol_type = other RNA
gttccaaactgatgacgaga

SEQ ID NO: 9510 - RNA, 20 nt, synthetic construct
  misc_feature 1..20: note = spacer sequence
  source 1..20: mol_type = other RNA
aaactgatgacgagactgtc

SEQ ID NO: 9511 - RNA, 20 nt, synthetic construct
  misc_feature 1..20: note = spacer sequence
  source 1..20: mol_type = other RNA
gtttggaactgataaagatg

SEQ ID NO: 9512 - RNA, 20 nt, synthetic construct
  misc_feature 1..20: note = spacer sequence
  source 1..20: mol_type = other RNA
tcagtttggaactgataaag

SEQ ID NO: 9513 - RNA, 20 nt, synthetic construct
  misc_feature 1..20: note = spacer sequence
  source 1..20: mol_type = other RNA
tcatcagtttggaactgata

SEQ ID NO: 9514 - RNA, 20 nt, synthetic construct
  misc_feature 1..20: note = spacer sequence
  source 1..20: mol_type = other RNA
cgtcatcagtttggaactga

SEQ ID NO: 9515 - RNA, 20 nt, synthetic construct
  misc_feature 1..20: note = spacer sequence
  source 1..20: mol_type = other RNA
cacaattgagtcaattacat

SEQ ID NO: 9516 - RNA, 20 nt, synthetic construct
  misc_feature 1..20: note = spacer sequence
  source 1..20: mol_type = other RNA
attgtgcgacagtctcgtca

SEQ ID NO: 9517 - RNA, 20 nt, synthetic construct
  misc_feature 1..20: note = spacer sequence
  source 1..20: mol_type = other RNA
attacatataatcccggaac

SEQ ID NO: 9518 - RNA, 20 nt, synthetic construct
  misc_feature 1..20: note = spacer sequence
  source 1..20: mol_type = other RNA
cggaaccttgtattctggtt

SEQ ID NO: 9519 - RNA, 20 nt, synthetic construct
  misc_feature 1..20: note = spacer sequence
  source 1..20: mol_type = other RNA
gggattatatgtaattgact

SEQ ID NO: 9520 - RNA, 20 nt, synthetic construct
  misc_feature 1..20: note = spacer sequence
  source 1..20: mol_type = other RNA
ggtttacactgcaaggataa

SEQ ID NO: 9521 - RNA, 20 nt, synthetic construct
  misc_feature 1..20: note = spacer sequence
  source 1..20: mol_type = other RNA
ttgcagtgtaaaccagaata

SEQ ID NO: 9522 - RNA, 20 nt, synthetic construct
  misc_feature 1..20: note = spacer sequence
  source 1..20: mol_type = other RNA
ttatccttgcagtgtaaacc

SEQ ID NO: 9523 - RNA, 20 nt, synthetic construct
  misc_feature 1..20: note = spacer sequence
  source 1..20: mol_type = other RNA
tacatctttatccttgcagt

SEQ ID NO: 9524 - RNA, 20 nt, synthetic construct
  misc_feature 1..20: note = spacer sequence
  source 1..20: mol_type = other RNA
gtacagaaaaagcaaagtca

SEQ ID NO: 9525 - RNA, 20 nt, synthetic construct
  misc_feature 1..20: note = spacer sequence
  source 1..20: mol_type = other RNA
gtactgatcttacatcttta

SEQ ID NO: 9526 - RNA, 20 nt, synthetic construct
  misc_feature 1..20: note = spacer sequence
  source 1..20: mol_type = other RNA
actaccaccagaaatatata

SEQ ID NO: 9527 - RNA, 20 nt, synthetic construct
  misc_feature 1..20: note = spacer sequence
  source 1..20: mol_type = other RNA
ataaagggttatacctgttt

SEQ ID NO: 9528 - RNA, 20 nt, synthetic construct
  misc_feature 1..20: note = spacer sequence
  source 1..20: mol_type = other RNA
tctataaagggttatacctg

SEQ ID NO: 9529 - RNA, 20 nt, synthetic construct
  misc_feature 1..20: note = spacer sequence
  source 1..20: mol_type = other RNA
tatttaatccaccaattcta

SEQ ID NO: 9530 - RNA, 20 nt, synthetic construct
  misc_feature 1..20: note = spacer sequence
  source 1..20: mol_type = other RNA
accaattctacatctaggaa

SEQ ID NO: 9531 - RNA, 20 nt, synthetic construct
  misc_feature 1..20: note = spacer sequence
  source 1..20: mol_type = other RNA
acatctaggaatttatgcaa

SEQ ID NO: 9532 - RNA, 20 nt, synthetic construct
  misc_feature 1..20: note = spacer sequence
  source 1..20: mol_type = other RNA
gttgttttataactgtgtga

SEQ ID NO: 9533 - RNA, 20 nt, synthetic construct
  misc_feature 1..20: note = spacer sequence
  source 1..20: mol_type = other RNA
gctgtctgttgttttataac

SEQ ID NO: 9534 - RNA, 20 nt, synthetic construct
  misc_feature 1..20: note = spacer sequence
  source 1..20: mol_type = other RNA
gttcagctgtctgttgtttt

SEQ ID NO: 9535 - RNA, 20 nt, synthetic construct
  misc_feature 1..20: note = spacer sequence
  source 1..20: mol_type = other RNA
gatgggaaaagggaaaaatt

SEQ ID NO: 9536 - RNA, 20 nt, synthetic construct
  misc_feature 1..20: note = spacer sequence
  source 1..20: mol_type = other RNA
gaataaaattattttcagtt

SEQ ID NO: 9537 - RNA, 20 nt, synthetic construct
  misc_feature 1..20: note = spacer sequence
  source 1..20: mol_type = other RNA
catcagaataaaattatttt

SEQ ID NO: 9538 - RNA, 20 nt, synthetic construct
  misc_feature 1..20: note = spacer sequence
  source 1..20: mol_type = other RNA
cttttcccatcagaataaaa

SEQ ID NO: 9539 - RNA, 20 nt, synthetic construct
  misc_feature 1..20: note = spacer sequence
  source 1..20: mol_type = other RNA
caatttttcccttttcccat

SEQ ID NO: 9540 - RNA, 20 nt, synthetic construct
  misc_feature 1..20: note = spacer sequence
  source 1..20: mol_type = other RNA
aattttcccaatttttccct

SEQ ID NO: 9541 - RNA, 20 nt, synthetic construct
  misc_feature 1..20: note = spacer sequence
  source 1..20: mol_type = other RNA
ttttaatcactagaagttta

SEQ ID NO: 9542 - RNA, 20 nt, synthetic construct
  misc_feature 1..20: note = spacer sequence
  source 1..20: mol_type = other RNA
agtgactaaatttttatgaa

SEQ ID NO: 9543 - RNA, 20 nt, synthetic construct
  misc_feature 1..20: note = spacer sequence
  source 1..20: mol_type = other RNA
ctagaggttctttttaatca

SEQ ID NO: 9544 - RNA, 20 nt, synthetic construct
  misc_feature 1..20: note = spacer sequence
  source 1..20: mol_type = other RNA
taaaaatttagtcactagag

SEQ ID NO: 9545 - RNA, 20 nt, synthetic construct
  misc_feature 1..20: note = spacer sequence
  source 1..20: mol_type = other RNA
aaaccacttcataaaaattt

SEQ ID NO: 9546 - RNA, 20 nt, synthetic construct
  misc_feature 1..20: note = spacer sequence
  source 1..20: mol_type = other RNA
atgcttgtttctaaaccact

SEQ ID NO: 9547 - RNA, 20 nt, synthetic construct
  misc_feature 1..20: note = spacer sequence
  source 1..20: mol_type = other RNA
caatgcttgtttctaaacca

SEQ ID NO: 9548 - RNA, 20 nt, synthetic construct
  misc_feature 1..20: note = spacer sequence
  source 1..20: mol_type = other RNA
ttttagttacaatatgattt

SEQ ID NO: 9549 - RNA, 20 nt, synthetic construct
  misc_feature 1..20: note = spacer sequence
  source 1..20: mol_type = other RNA
ttataacctcattttagtta

SEQ ID NO: 9550 - RNA, 20 nt, synthetic construct
  misc_feature 1..20: note = spacer sequence
  source 1..20: mol_type = other RNA
cattataacctcattttagt

SEQ ID NO: 9551 - RNA, 20 nt, synthetic construct
  misc_feature 1..20: note = spacer sequence
  source 1..20: mol_type = other RNA
ctcattataacctcatttta

SEQ ID NO: 9552 - RNA, 20 nt, synthetic construct
  misc_feature 1..20: note = spacer sequence
  source 1..20: mol_type = other RNA
aaaaggtaactatctctcat

SEQ ID NO: 9553 - RNA, 20 nt, synthetic construct
  misc_feature 1..20: note = spacer sequence
  source 1..20: mol_type = other RNA
tcaaaaaggtaactatctct

SEQ ID NO: 9554 - RNA, 20 nt, synthetic construct
  misc_feature 1..20: note = spacer sequence
  source 1..20: mol_type = other RNA
actatttgaactacatgctt

SEQ ID NO: 9555 - RNA, 20 nt, synthetic construct
  misc_feature 1..20: note = spacer sequence
  source 1..20: mol_type = other RNA
aatagtagaaaagttcatca

SEQ ID NO: 9556 - RNA, 20 nt, synthetic construct
  misc_feature 1..20: note = spacer sequence
  source 1..20: mol_type = other RNA
gctttataagcatgtagttc

SEQ ID NO: 9557 - RNA, 20 nt, synthetic construct
  misc_feature 1..20: note = spacer sequence
  source 1..20: mol_type = other RNA
tttcagctttataagcatgt

SEQ ID NO: 9558 - RNA, 20 nt, synthetic construct
  misc_feature 1..20: note = spacer sequence
  source 1..20: mol_type = other RNA
taattcttttcagctttata

SEQ ID NO: 9559 - RNA, 20 nt, synthetic construct
  misc_feature 1..20: note = spacer sequence
  source 1..20: mol_type = other RNA
cttaattcttttcagcttta

SEQ ID NO: 9560 - RNA, 20 nt, synthetic construct
  misc_feature 1..20: note = spacer sequence
  source 1..20: mol_type = other RNA
gtttacttatttctacattt

SEQ ID NO: 9561 - RNA, 20 nt, synthetic construct
  misc_feature 1..20: note = spacer sequence
  source 1..20: mol_type = other RNA
aattataggaaatgtagaaa

SEQ ID NO: 9562 - RNA, 20 nt, synthetic construct
  misc_feature 1..20: note = spacer sequence
  source 1..20: mol_type = other RNA
taaaactctgaaatctatac

SEQ ID NO: 9563 - RNA, 20 nt, synthetic construct
  misc_feature 1..20: note = spacer sequence
  source 1..20: mol_type = other RNA
gaaatctatacaatctaaat

SEQ ID NO: 9564 - RNA, 20 nt, synthetic construct
  misc_feature 1..20: note = spacer sequence
  source 1..20: mol_type = other RNA
gagttttaagaattttctaa

SEQ ID NO: 9565 - RNA, 20 nt, synthetic construct
  misc_feature 1..20: note = spacer sequence
  source 1..20: mol_type = other RNA
atacaatctaaatattatca

SEQ ID NO: 9566 - RNA, 20 nt, synthetic construct
  misc_feature 1..20: note = spacer sequence
  source 1..20: mol_type = other RNA
aaatattatcaatactgaat

SEQ ID NO: 9567 - RNA, 20 nt, synthetic construct
  misc_feature 1..20: note = spacer sequence
  source 1..20: mol_type = other RNA
atactgaatgaaccatgaga

SEQ ID NO: 9568 - RNA, 20 nt, synthetic construct
  misc_feature 1..20: note = spacer sequence
  source 1..20: mol_type = other RNA
gtattgataatatttagatt

SEQ ID NO: 9569 - RNA, 20 nt, synthetic construct
  misc_feature 1..20: note = spacer sequence
  source 1..20: mol_type = other RNA
ttcagtattgataatattta

SEQ ID NO: 9570 - RNA, 20 nt, synthetic construct
  misc_feature 1..20: note = spacer sequence
  source 1..20: mol_type = other RNA
tggttcattcagtattgata

SEQ ID NO: 9571 - RNA, 20 nt, synthetic construct
  misc_feature 1..20: note = spacer sequence
  source 1..20: mol_type = other RNA
catggttcattcagtattga

SEQ ID NO: 9572 - RNA, 20 nt, synthetic construct
  misc_feature 1..20: note = spacer sequence
  source 1..20: mol_type = other RNA
aaatttcaaaaagatttctc

SEQ ID NO: 9573 - RNA, 20 nt, synthetic construct
  misc_feature 1..20: note = spacer sequence
  source 1..20: mol_type = other RNA
aaaagatttctcaaattgct

SEQ ID NO: 9574 - RNA, 20 nt, synthetic construct
  misc_feature 1..20: note = spacer sequence
  source 1..20: mol_type = other RNA
ttttgaaattttgaaaatat

SEQ ID NO: 9575 - RNA, 20 nt, synthetic construct
  misc_feature 1..20: note = spacer sequence
  source 1..20: mol_type = other RNA
caaattgctttattttatca

SEQ ID NO: 9576 - RNA, 20 nt, synthetic construct
  misc_feature 1..20: note = spacer sequence
  source 1..20: mol_type = other RNA
aattgctttattttatcatt

SEQ ID NO: 9577 - RNA, 20 nt, synthetic construct
  misc_feature 1..20: note = spacer sequence
  source 1..20: mol_type = other RNA
ttaccttaatagctttaata

SEQ ID NO: 9578 - RNA, 20 nt, synthetic construct
  misc_feature 1..20: note = spacer sequence
  source 1..20: mol_type = other RNA
ctaaagctgctattaaagct

SEQ ID NO: 9579 - RNA, 20 nt, synthetic construct
  misc_feature 1..20: note = spacer sequence
  source 1..20: mol_type = other RNA
tcactaaagctgctattaaa

SEQ ID NO: 9580 - RNA, 20 nt, synthetic construct
  misc_feature 1..20: note = spacer sequence
  source 1..20: mol_type = other RNA
catcactaaagctgctatta

SEQ ID NO: 9581 - RNA, 20 nt, synthetic construct
  misc_feature 1..20: note = spacer sequence
  source 1..20: mol_type = other RNA
tcttggctctagagatggga

SEQ ID NO: 9582 - RNA, 20 nt, synthetic construct
  misc_feature 1..20: note = spacer sequence
  source 1..20: mol_type = other RNA
tggctctagagatgggaggt

SEQ ID NO: 9583 - RNA, 20 nt, synthetic construct
  misc_feature 1..20: note = spacer sequence
  source 1..20: mol_type = other RNA
agagatgggaggtttcatat

SEQ ID NO: 9584 - RNA, 20 nt, synthetic construct
  misc_feature 1..20: note = spacer sequence
  source 1..20: mol_type = other RNA
agagccaagatgattctcat

SEQ ID NO: 9585 - RNA, 20 nt, synthetic construct
  misc_feature 1..20: note = spacer sequence
  source 1..20: mol_type = other RNA
ctagagccaagatgattctc

SEQ ID NO: 9586 - RNA, 20 nt, synthetic construct
  misc_feature 1..20: note = spacer sequence
  source 1..20: mol_type = other RNA
catctctagagccaagatga

SEQ ID NO: 9587 - RNA, 20 nt, synthetic construct
  misc_feature 1..20: note = spacer sequence
  source 1..20: mol_type = other RNA
tatccataagcgaaaagagc

SEQ ID NO: 9588 - RNA, 20 nt, synthetic construct
  misc_feature 1..20: note = spacer sequence
  source 1..20: mol_type = other RNA
ataagcgaaaagagcttaaa

SEQ ID NO: 9589 - RNA, 20 nt, synthetic construct
  misc_feature 1..20: note = spacer sequence
  source 1..20: mol_type = other RNA
cttatggatatgaaacctcc

SEQ ID NO: 9590 - RNA, 20 nt, synthetic construct
  misc_feature 1..20: note = spacer sequence
  source 1..20: mol_type = other RNA
tttcgcttatggatatgaaa

SEQ ID NO: 9591 - RNA, 20 nt, synthetic construct
  misc_feature 1..20: note = spacer sequence
  source 1..20: mol_type = other RNA
tttaagctcttttcgcttat

SEQ ID NO: 9592 - RNA, 20 nt, synthetic construct
  misc_feature 1..20: note = spacer sequence
  source 1..20: mol_type = other RNA
ccacccctttggcagagcta

SEQ ID NO: 9593 - RNA, 20 nt, synthetic construct
  misc_feature 1..20: note = spacer sequence
  source 1..20: mol_type = other RNA
ctaccccttcgccacccctt

SEQ ID NO: 9594 - RNA, 20 nt, synthetic construct
  misc_feature 1..20: note = spacer sequence
  source 1..20: mol_type = other RNA
tttcactaccccttcgccac

SEQ ID NO: 9595 - RNA, 20 nt, synthetic construct
  misc_feature 1..20: note = spacer sequence
  source 1..20: mol_type = other RNA
ttcatttcactaccccttcg

SEQ ID NO: 9596 - RNA, 20 nt, synthetic construct
  misc_feature 1..20: note = spacer sequence
  source 1..20: mol_type = other RNA
tccttcatttcactacccct

SEQ ID NO: 9597 - RNA, 20 nt, synthetic construct
  misc_feature 1..20: note = spacer sequence
  source 1..20: mol_type = other RNA
tgggctcttccttcatttca

SEQ ID NO: 9598 - RNA, 20 nt, synthetic construct
  misc_feature 1..20: note = spacer sequence
  source 1..20: mol_type = other RNA
gcatggctgtcagctaaacc

SEQ ID NO: 9599 - RNA, 20 nt, synthetic construct
  misc_feature 1..20: note = spacer sequence
  source 1..20: mol_type = other RNA
gctaaacctgctcctgcaaa

SEQ ID NO: 9600 - RNA, 20 nt, synthetic construct
  misc_feature 1..20: note = spacer sequence
  source 1..20: mol_type = other RNA
tgcaaaagtggaaatgaggc

SEQ ID NO: 9601 - RNA, 20 nt, synthetic construct
  misc_feature 1..20: note = spacer sequence
  source 1..20: mol_type = other RNA
acttttgcaggagcaggttt

SEQ ID NO: 9602 - RNA, 20 nt, synthetic construct
  misc_feature 1..20: note = spacer sequence
  source 1..20: mol_type = other RNA
tttccacttttgcaggagca

SEQ ID NO: 9603 - RNA, 20 nt, synthetic construct
  misc_feature 1..20: note = spacer sequence
  source 1..20: mol_type = other RNA
gcctcatttccacttttgca

SEQ ID NO: 9604 - RNA, 20 nt, synthetic construct
  misc_feature 1..20: note = spacer sequence
  source 1..20: mol_type = other RNA
gctgccttttttcagcctca

SEQ ID NO: 9605 - RNA, 20 nt, synthetic construct
  misc_feature 1..20: note = spacer sequence
  source 1..20: mol_type = other RNA
ttagacaaagatgtgcaaac

SEQ ID NO: 9606 - RNA, 20 nt, synthetic construct
  misc_feature 1..20: note = spacer sequence
  source 1..20: mol_type = other RNA
aaggatttatacttctgctg

SEQ ID NO: 9607 - RNA, 20 nt, synthetic construct
  misc_feature 1..20: note = spacer sequence
  source 1..20: mol_type = other RNA
ttgtctaaggatttatactt

SEQ ID NO: 9608 - RNA, 20 nt, synthetic construct
  misc_feature 1..20: note = spacer sequence
  source 1..20: mol_type = other RNA
cttttgtttgcacatctttg

SEQ ID NO: 9609 - RNA, 20 nt, synthetic construct
  misc_feature 1..20: note = spacer sequence
  source 1..20: mol_type = other RNA
ctttcccttttgtttgcaca

SEQ ID NO: 9610 - RNA, 20 nt, synthetic construct
  misc_feature 1..20: note = spacer sequence
  source 1..20: mol_type = other RNA
ccctccctttcccttttgtt

SEQ ID NO: 9611 - RNA, 20 nt, synthetic construct
  misc_feature 1..20: note = spacer sequence
  source 1..20: mol_type = other RNA
ttgctccccctccctttccc

SEQ ID NO: 9612 - RNA, 20 nt, synthetic construct
  misc_feature 1..20: note = spacer sequence
  source 1..20: mol_type = other RNA
ctttgctccccctccctttc

SEQ ID NO: 9613 - RNA, 20 nt, synthetic construct
  misc_feature 1..20: note = spacer sequence
  source 1..20: mol_type = other RNA
gttttctctttgctccccct

SEQ ID NO: 9614 - RNA, 20 nt, synthetic construct
  misc_feature 1..20: note = spacer sequence
  source 1..20: mol_type = other RNA
agtgactaaccaagaaacta

SEQ ID NO: 9615 - RNA, 20 nt, synthetic construct
  misc_feature 1..20: note = spacer sequence
  source 1..20: mol_type = other RNA
cttgagtctgttttctcttt

SEQ ID NO: 9616 - RNA, 20 nt, synthetic construct
  misc_feature 1..20: note = spacer sequence
  source 1..20: mol_type = other RNA
tggttagtcacttgagtctg

SEQ ID NO: 9617 - RNA, 20 nt, synthetic construct
  misc_feature 1..20: note = spacer sequence
  source 1..20: mol_type = other RNA
ttagtttcttggttagtcac

SEQ ID NO: 9618 - RNA, 20 nt, synthetic construct
  misc_feature 1..20: note = spacer sequence
  source 1..20: mol_type = other RNA
gcaggtaaatctttagtttc

SEQ ID NO: 9619 - RNA, 20 nt, synthetic construct
  misc_feature 1..20: note = spacer sequence
  source 1..20: mol_type = other RNA
gttttctgcaggtaaatctt

SEQ ID NO: 9620 - RNA, 20 nt, synthetic construct
  misc_feature 1..20: note = spacer sequence
  source 1..20: mol_type = other RNA
ccgttttctgcaggtaaatc

SEQ ID NO: 9621 - RNA, 20 nt, synthetic construct
  misc_feature 1..20: note = spacer sequence
  source 1..20: mol_type = other RNA
ttggttttagtttctccgtt

SEQ ID NO: 9622 - RNA, 20 nt, synthetic construct
  misc_feature 1..20: note = spacer sequence
  source 1..20: mol_type = other RNA
cattggttttagtttctccg

SEQ ID NO: 9623 - RNA, 20 nt, synthetic construct
  misc_feature 1..20: note = spacer sequence
  source 1..20: mol_type = other RNA
agcctctgatgaagccagag

SEQ ID NO: 9624 - RNA, 20 nt, synthetic construct
  misc_feature 1..20: note = spacer sequence
  source 1..20: mol_type = other RNA
gatgaagccagagaaagaag

SEQ ID NO: 9625 - RNA, 20 nt, synthetic construct
  misc_feature 1..20: note = spacer sequence
  source 1..20: mol_type = other RNA
gaggctggactctcattggt

SEQ ID NO: 9626 - RNA, 20 nt, synthetic construct
  misc_feature 1..20: note = spacer sequence
  source 1..20: mol_type = other RNA
tcagaggctggactctcatt

SEQ ID NO: 9627 - RNA, 20 nt, synthetic construct
  misc_feature 1..20: note = spacer sequence
  source 1..20: mol_type = other RNA
ggcttcatcagaggctggac

SEQ ID NO: 9628 - RNA, 20 nt, synthetic construct
  misc_feature 1..20: note = spacer sequence
  source 1..20: mol_type = other RNA
ctggcttcatcagaggctgg

SEQ ID NO: 9629 - RNA, 20 nt, synthetic construct
  misc_feature 1..20: note = spacer sequence
  source 1..20: mol_type = other RNA
ttctctggcttcatcagagg

SEQ ID NO: 9630 - RNA, 20 nt, synthetic construct
  misc_feature 1..20: note = spacer sequence
  source 1..20: mol_type = other RNA
actcagtacataccatgtct

SEQ ID NO: 9631 - RNA, 20 nt, synthetic construct
  misc_feature 1..20: note = spacer sequence
  source 1..20: mol_type = other RNA
gtacataccatgtcttatca

SEQ ID NO: 9632 - RNA, 20 nt, synthetic construct
  misc_feature 1..20: note = spacer sequence
  source 1..20: mol_type = other RNA
tatcagtggtctctgtctcc

SEQ ID NO: 9633 - RNA, 20 nt, synthetic construct
  misc_feature 1..20: note = spacer sequence
  source 1..20: mol_type = other RNA
gtggtctctgtctcccctct

SEQ ID NO: 9634 - RNA, 20 nt, synthetic construct
  misc_feature 1..20: note = spacer sequence
  source 1..20: mol_type = other RNA
ctgtctcccctctcttcaat

SEQ ID NO: 9635 - RNA, 20 nt, synthetic construct
  misc_feature 1..20: note = spacer sequence
  source 1..20: mol_type = other RNA
gtctcccctctcttcaatcc

SEQ ID NO: 9636 - RNA, 20 nt, synthetic construct
  misc_feature 1..20: note = spacer sequence
  source 1..20: mol_type = other RNA
cccctctcttcaatccagag

SEQ ID NO: 9637 - RNA, 20 nt, synthetic construct
  misc_feature 1..20: note = spacer sequence
  source 1..20: mol_type = other RNA
cctctcttcaatccagagga

SEQ ID NO: 9638 - RNA, 20 nt, synthetic construct
  misc_feature 1..20: note = spacer sequence
  source 1..20: mol_type = other RNA
cttcaatccagaggagtatt

SEQ ID NO: 9639 - RNA, 20 nt, synthetic construct
  misc_feature 1..20: note = spacer sequence
  source 1..20: mol_type = other RNA
tcaatccagaggagtatttt

SEQ ID NO: 9640 - RNA, 20 nt, synthetic construct
  misc_feature 1..20: note = spacer sequence
  source 1..20: mol_type = other RNA
atccagaggagtatttttat

SEQ ID NO: 9641 - RNA, 20 nt, synthetic construct
  misc_feature 1..20: note = spacer sequence
  source 1..20: mol_type = other RNA
agaggagtatttttatcaac

SEQ ID NO: 9642 - RNA, 20 nt, synthetic construct
  misc_feature 1..20: note = spacer sequence
  source 1..20: mol_type = other RNA
ggattgaagagaggggagac

SEQ ID NO: 9643 - RNA, 20 nt, synthetic construct
  misc_feature 1..20: note = spacer sequence
  source 1..20: mol_type = other RNA
tctggattgaagagagggga

SEQ ID NO: 9644 - RNA, 20 nt, synthetic construct
  misc_feature 1..20: note = spacer sequence
  source 1..20: mol_type = other RNA
actattttgtaaatgcaaga

SEQ ID NO: 9645 - RNA, 20 nt, synthetic construct
  misc_feature 1..20: note = spacer sequence
  source 1..20: mol_type = other RNA
tgcatttacaaaatagttga

SEQ ID NO: 9646 - RNA, 20 nt, synthetic construct
  misc_feature 1..20: note = spacer sequence
  source 1..20: mol_type = other RNA
agaaacatttttaaggaggg

SEQ ID NO: 9647 - RNA, 20 nt, synthetic construct
  misc_feature 1..20: note = spacer sequence
  source 1..20: mol_type = other RNA
agacctactaaaatcttgca

SEQ ID NO: 9648 - RNA, 20 nt, synthetic construct
  misc_feature 1..20: note = spacer sequence
  source 1..20: mol_type = other RNA
ttaaaaatgtttctagacct

SEQ ID NO: 9649 - RNA, 20 nt, synthetic construct
  misc_feature 1..20: note = spacer sequence
  source 1..20: mol_type = other RNA
ctccttaaaaatgtttctag

SEQ ID NO: 9650 - RNA, 20 nt, synthetic construct
  misc_feature 1..20: note = spacer sequence
  source 1..20: mol_type = other RNA
cagttcatcccattttttat

SEQ ID NO: 9651 - RNA, 20 nt, synthetic construct
  misc_feature 1..20: note = spacer sequence
  source 1..20: mol_type = other RNA
tcccattttttatgtataaa

SEQ ID NO: 9652 - RNA, 20 nt, synthetic construct
  misc_feature 1..20: note = spacer sequence
  source 1..20: mol_type = other RNA
cattttttatgtataaatgc

SEQ ID NO: 9653 - RNA, 20 nt, synthetic construct
  misc_feature 1..20: note = spacer sequence
  source 1..20: mol_type = other RNA
taaaaaaaagcatttataca

SEQ ID NO: 9654 - RNA, 20 nt, synthetic construct
  misc_feature 1..20: note = spacer sequence
  source 1..20: mol_type = other RNA
ttcactggttgtttacttta

SEQ ID NO: 9655 - RNA, 20 nt, synthetic construct
  misc_feature 1..20: note = spacer sequence
  source 1..20: mol_type = other RNA
ctggttgtttactttatttt

SEQ ID NO: 9656 - RNA, 20 nt, synthetic construct
  misc_feature 1..20: note = spacer sequence
  source 1..20: mol_type = other RNA
ggttgtaccaaaaaataaag

SEQ ID NO: 9657 - RNA, 20 nt, synthetic construct
  misc_feature 1..20: note = spacer sequence
  source 1..20: mol_type = other RNA
gttctggttgtaccaaaaaa

SEQ ID NO: 9658 - RNA, 20 nt, synthetic construct
  misc_feature 1..20: note = spacer sequence
  source 1..20: mol_type = other RNA
cacactctgttctggttgta

SEQ ID NO: 9659 - RNA, 20 nt, synthetic construct
  misc_feature 1..20: note = spacer sequence
  source 1..20: mol_type = other RNA
cataatacaacatcccacac

SEQ ID NO: 9660 - RNA, 20 nt, synthetic construct
  misc_feature 1..20: note = spacer sequence
  source 1..20: mol_type = other RNA
aagcctcccataatacaaca

SEQ ID NO: 9661 - RNA, 20 nt, synthetic construct
  misc_feature 1..20: note = spacer sequence
  source 1..20: mol_type = other RNA
tgggtgtcagcttaacattc

SEQ ID NO: 9662 - RNA, 20 nt, synthetic construct
  misc_feature 1..20: note = spacer sequence
  source 1..20: mol_type = other RNA
gcttaacattccatagatgg

SEQ ID NO: 9663 - RNA, 20 nt, synthetic construct
  misc_feature 1..20: note = spacer sequence
  source 1..20: mol_type = other RNA
atagatgggggggttacttt

SEQ ID NO: 9664 - RNA, 20 nt, synthetic construct
  misc_feature 1..20: note = spacer sequence
  source 1..20: mol_type = other RNA
atggaatgttaagctgacac

SEQ ID NO: 9665 - RNA, 20 nt, synthetic construct
  misc_feature 1..20: note = spacer sequence
  source 1..20: mol_type = other RNA
tataatgtctctactaaata

SEQ ID NO: 9666 - RNA, 20 nt, synthetic construct
  misc_feature 1..20: note = spacer sequence
  source 1..20: mol_type = other RNA
ctactaaatatacaaatatt

SEQ ID NO: 9667 - RNA, 20 nt, synthetic construct
  misc_feature 1..20: note = spacer sequence
  source 1..20: mol_type = other RNA
actaaatatacaaatattag

SEQ ID NO: 9668 - RNA, 20 nt, synthetic construct
  misc_feature 1..20: note = spacer sequence
  source 1..20: mol_type = other RNA
caggtaagtgtatgcttatg

SEQ ID NO: 9669 - RNA, 20 nt, synthetic construct
  misc_feature 1..20: note = spacer sequence
  source 1..20: mol_type = other RNA
aaaagatattgtgaagtaag

SEQ ID NO: 9670 - RNA, 20 nt, synthetic construct
  misc_feature 1..20: note = spacer sequence
  source 1..20: mol_type = other RNA
tttggaagtcccaggtaagt

SEQ ID NO: 9671 - RNA, 20 nt, synthetic construct
  misc_feature 1..20: note = spacer sequence
  source 1..20: mol_type = other RNA
caatatcttttggaagtccc

SEQ ID NO: 9672 - RNA, 20 nt, synthetic construct
  misc_feature 1..20: note = spacer sequence
  source 1..20: mol_type = other RNA
gagatcccaacattatgaaa

SEQ ID NO: 9673 - RNA, 20 nt, synthetic construct
  misc_feature 1..20: note = spacer sequence
  source 1..20: mol_type = other RNA
gaaacttacttcacaatatc

SEQ ID NO: 9674 - RNA, 20 nt, synthetic construct
  misc_feature 1..20: note = spacer sequence
  source 1..20: mol_type = other RNA
ctgaaacttacttcacaata

SEQ ID NO: 9675 - RNA, 20 nt, synthetic construct
  misc_feature 1..20: note = spacer sequence
  source 1..20: mol_type = other RNA
caacattatgaaactcatat

SEQ ID NO: 9676 - RNA, 20 nt, synthetic construct
  misc_feature 1..20: note = spacer sequence
  source 1..20: mol_type = other RNA
taatgttgggatctctgaaa

SEQ ID NO: 9677 - RNA, 20 nt, synthetic construct
  misc_feature 1..20: note = spacer sequence
  source 1..20: mol_type = other RNA
tatgaatcacatttccattc

SEQ ID NO: 9678 - RNA, 20 nt, synthetic construct
  misc_feature 1..20: note = spacer sequence
  source 1..20: mol_type = other RNA
tatgagtttcataatgttgg

SEQ ID NO: 9679 - RNA, 20 nt, synthetic construct
  misc_feature 1..20: note = spacer sequence
  source 1..20: mol_type = other RNA
catttccattctttcaattt

SEQ ID NO: 9680 - RNA, 20 nt, synthetic construct
  misc_feature 1..20: note = spacer sequence
  source 1..20: mol_type = other RNA
tcattgtattacttcattta

SEQ ID NO: 9681 - RNA, 20 nt, synthetic construct
  misc_feature 1..20: note = spacer sequence
  source 1..20: mol_type = other RNA
ttgtattacttcatttacca

SEQ ID NO: 9682 - RNA, 20 nt, synthetic construct
  misc_feature 1..20: note = spacer sequence
  source 1..20: mol_type = other RNA
tttaccaatgtaataaaaaa

SEQ ID NO: 9683 - RNA, 20 nt, synthetic construct
  misc_feature 1..20: note = spacer sequence
  source 1..20: mol_type = other RNA
ttgagaataaaacgctcact

SEQ ID NO: 9684 - RNA, 20 nt, synthetic construct
  misc_feature 1..20: note = spacer sequence
  source 1..20: mol_type = other RNA
aagataatttttttattaca

SEQ ID NO: 9685 - RNA, 20 nt, synthetic construct
  misc_feature 1..20: note = spacer sequence
  source 1..20: mol_type = other RNA
caaagataatttttttatta

SEQ ID NO: 9686 - RNA, 20 nt, synthetic construct
  misc_feature 1..20: note = spacer sequence
  source 1..20: mol_type = other RNA
ctaactgaaaggcaattaga

SEQ ID NO: 9687 - RNA, 20 nt, synthetic construct
  misc_feature 1..20: note = spacer sequence
  source 1..20: mol_type = other RNA
gttagtgagcgttttattct

SEQ ID NO: 9688 - RNA, 20 nt, synthetic construct
  misc_feature 1..20: note = spacer sequence
  source 1..20: mol_type = other RNA
aattgcctttcagttagtga

SEQ ID NO: 9689 - RNA, 20 nt, synthetic construct
  misc_feature 1..20: note = spacer sequence
  source 1..20: mol_type = other RNA
tttctaattgcctttcagtt

SEQ ID NO: 9690 - RNA, 20 nt, synthetic construct
  misc_feature 1..20: note = spacer sequence
  source 1..20: mol_type = other RNA
tgcctgtaatcccagcactt

SEQ ID NO: 9691 - RNA, 20 nt, synthetic construct
  misc_feature 1..20: note = spacer sequence
  source 1..20: mol_type = other RNA
cagctacttgggaggctgag

SEQ ID NO: 9692 - RNA, 20 nt, synthetic construct
  misc_feature 1..20: note = spacer sequence
  source 1..20: mol_type = other RNA
caagtagctgggactacagg

SEQ ID NO: 9693 - RNA, 20 nt, synthetic construct
  misc_feature 1..20: note = spacer sequence
  source 1..20: mol_type = other RNA
gcctcccaagtagctgggac

SEQ ID NO: 9694 - RNA, 20 nt, synthetic construct
  misc_feature 1..20: note = spacer sequence
  source 1..20: mol_type = other RNA
tgcctcagcctcccaagtag

SEQ ID NO: 9695 - RNA, 20 nt, synthetic construct
  misc_feature 1..20: note = spacer sequence
  source 1..20: mol_type = other RNA
cctgcctcagcctcccaagt

SEQ ID NO: 9696 - RNA, 20 nt, synthetic construct
  misc_feature 1..20: note = spacer sequence
  source 1..20: mol_type = other RNA
cttgaacccaggaggcggac

SEQ ID NO: 9697 - RNA, 20 nt, synthetic construct
  misc_feature 1..20: note = spacer sequence
  source 1..20: mol_type = other RNA
agcgattctcctgcctcagc

SEQ ID NO: 9698 - RNA, 20 nt, synthetic construct
  misc_feature 1..20: note = spacer sequence
  source 1..20: mol_type = other RNA
tgggttcaagcgattctcct

SEQ ID NO: 9699 - RNA, 20 nt, synthetic construct
  misc_feature 1..20: note = spacer sequence
  source 1..20: mol_type = other RNA
gcctcctgggttcaagcgat

SEQ ID NO: 9700 - RNA, 20 nt, synthetic construct
  misc_feature 1..20: note = spacer sequence
  source 1..20: mol_type = other RNA
gtccgcctcctgggttcaag

SEQ ID NO: 9701 - RNA, 20 nt, synthetic construct
  misc_feature 1..20: note = spacer sequence
  source 1..20: mol_type = other RNA
tactggtttgtataatttta

SEQ ID NO: 9702 - RNA, 20 nt, synthetic construct
  misc_feature 1..20: note = spacer sequence
  source 1..20: mol_type = other RNA
acttaaacacaaattctaaa

SEQ ID NO: 9703 - RNA, 20 nt, synthetic construct
  misc_feature 1..20: note = spacer sequence
  source 1..20: mol_type = other RNA
aaaaatatcaacactgtatg

SEQ ID NO: 9704 - RNA, 20 nt, synthetic construct
  misc_feature 1..20: note = spacer sequence
  source 1..20: mol_type = other RNA
acactgtatgatttataaat

SEQ ID NO: 9705 - RNA, 20 nt, synthetic construct
  misc_feature 1..20: note = spacer sequence
  source 1..20: mol_type = other RNA
tacagtgttgatatttttag

SEQ ID NO: 9706 - RNA, 20 nt, synthetic construct
  misc_feature 1..20: note = spacer sequence
  source 1..20: mol_type = other RNA
gttataaaatctattaagac

SEQ ID NO: 9707 - RNA, 20 nt, synthetic construct
  misc_feature 1..20: note = spacer sequence
  source 1..20: mol_type = other RNA
attaagacagttgcttatta

SEQ ID NO: 9708 - RNA, 20 nt, synthetic construct
  misc_feature 1..20: note = spacer sequence
  source 1..20: mol_type = other RNA
taatagattttataacagaa

SEQ ID NO: 9709 - RNA, 20 nt, synthetic construct
  misc_feature 1..20: note = spacer sequence
  source 1..20: mol_type = other RNA
attttctataccttaacaca

SEQ ID NO: 9710 - RNA, 20 nt, synthetic construct
  misc_feature 1..20: note = spacer sequence
  source 1..20: mol_type = other RNA
ataccttaacacagtgaaag

SEQ ID NO: 9711 - RNA, 20 nt, synthetic construct
  misc_feature 1..20: note = spacer sequence
  source 1..20: mol_type = other RNA
ctgtgttaaggtatagaaaa

SEQ ID NO: 9712 - RNA, 20 nt, synthetic construct
  misc_feature 1..20: note = spacer sequence
  source 1..20: mol_type = other RNA
cctttcactgtgttaaggta

SEQ ID NO: 9713 - RNA, 20 nt, synthetic construct
  misc_feature 1..20: note = spacer sequence
  source 1..20: mol_type = other RNA
taatgaacacacccacacac

SEQ ID NO: 9714 - RNA, 20 nt, synthetic construct
  misc_feature 1..20: note = spacer sequence
  source 1..20: mol_type = other RNA
ttaagacctatgggtttttg

SEQ ID NO: 9715 - RNA, 20 nt, synthetic construct
  misc_feature 1..20: note = spacer sequence
  source 1..20: mol_type = other RNA
tgggttgtctccacaactct

SEQ ID NO: 9716 - RNA, 20 nt, synthetic construct
  misc_feature 1..20: note = spacer sequence
  source 1..20: mol_type = other RNA
ccacaactcttcaatgattt

SEQ ID NO: 9717 - RNA, 20 nt, synthetic construct
  misc_feature 1..20: note = spacer sequence
  source 1..20: mol_type = other RNA
acaactcttcaatgatttat

SEQ ID NO: 9718 - RNA, 20 nt, synthetic construct
  misc_feature 1..20: note = spacer sequence
  source 1..20: mol_type = other RNA
tcaatgatttatgcaaaaat

SEQ ID NO: 9719 - RNA, 20 nt, synthetic construct
  misc_feature 1..20: note = spacer sequence
  source 1..20: mol_type = other RNA
atgatttatgcaaaaatcct

SEQ ID NO: 9720 - RNA, 20 nt, synthetic construct
  misc_feature 1..20: note = spacer sequence
  source 1..20: mol_type = other RNA
ttgaagagttgtggagacaa

SEQ ID NO: 9721 - RNA, 20 nt, synthetic construct
  misc_feature 1..20: note = spacer sequence
  source 1..20: mol_type = other RNA
tgaagaaactagaaaccctc

SEQ ID NO: 9722 - RNA, 20 nt, synthetic construct
  misc_feature 1..20: note = spacer sequence
  source 1..20: mol_type = other RNA
ggatttttgcataaatcatt

SEQ ID NO: 9723 - RNA, 20 nt, synthetic construct
  misc_feature 1..20: note = spacer sequence
  source 1..20: mol_type = other RNA
tcaggatttttgcataaatc

SEQ ID NO: 9724 - RNA, 20 nt, synthetic construct
  misc_feature 1..20: note = spacer sequence
  source 1..20: mol_type = other RNA
agtttcttcaggatttttgc

SEQ ID NO: 9725 - RNA, 20 nt, synthetic construct
  misc_feature 1..20: note = spacer sequence
  source 1..20: mol_type = other RNA
cttccttgttctcaacctcc

SEQ ID NO: 9726 - RNA, 20 nt, synthetic construct
  misc_feature 1..20: note = spacer sequence
  source 1..20: mol_type = other RNA
ttgttctcaacctcctgagt

SEQ ID NO: 9727 - RNA, 20 nt, synthetic construct
  misc_feature 1..20: note = spacer sequence
  source 1..20: mol_type = other RNA
caacctcctgagtcaagacc

SEQ ID NO: 9728 - RNA, 20 nt, synthetic construct
  misc_feature 1..20: note = spacer sequence
  source 1..20: mol_type = other RNA
acctcctgagtcaagaccac

SEQ ID NO: 9729 - RNA, 20 nt, synthetic construct
  misc_feature 1..20: note = spacer sequence
  source 1..20: mol_type = other RNA
tgagtcaagaccacttcttg

SEQ ID NO: 9730 - RNA, 20 nt, synthetic construct
  misc_feature 1..20: note = spacer sequence
  source 1..20: mol_type = other RNA
ggaggttgagaacaaggaag

SEQ ID NO: 9731 - RNA, 20 nt, synthetic construct
  misc_feature 1..20: note = spacer sequence
  source 1..20: mol_type = other RNA
agaccacttcttgatgtgat

SEQ ID NO: 9732 - RNA, 20 nt, synthetic construct
  misc_feature 1..20: note = spacer sequence
  source 1..20: mol_type = other RNA
tgactcaggaggttgagaac

SEQ ID NO: 9733 - RNA, 20 nt, synthetic construct
  misc_feature 1..20: note = spacer sequence
  source 1..20: mol_type = other RNA
tgatgtgattcatgccaaac

SEQ ID NO: 9734 - RNA, 20 nt, synthetic construct
  misc_feature 1..20: note = spacer sequence
  source 1..20: mol_type = other RNA
agaagtggtcttgactcagg

SEQ ID NO: 9735 - RNA, 20 nt, synthetic construct
  misc_feature 1..20: note = spacer sequence
  source 1..20: mol_type = other RNA
catcaagaagtggtcttgac

SEQ ID NO: 9736 - RNA, 20 nt, synthetic construct
  misc_feature 1..20: note = spacer sequence
  source 1..20: mol_type = other RNA
tgccaaacacttaagacact

SEQ ID NO: 9737 - RNA, 20 nt, synthetic construct
  misc_feature 1..20: note = spacer sequence
  source 1..20: mol_type = other RNA
taagtgtttggcatgaatca

SEQ ID NO: 9738 - RNA, 20 nt, synthetic construct
  misc_feature 1..20: note = spacer sequence
  source 1..20: mol_type = other RNA
aaaatatagcagtgtcttaa

SEQ ID NO: 9739 - RNA, 20 nt, synthetic construct
  misc_feature 1..20: note = spacer sequence
  source 1..20: mol_type = other RNA
atccaaaatatagcagtgtc

SEQ ID NO: 9740 - RNA, 20 nt, synthetic construct
  misc_feature 1..20: note = spacer sequence
  source 1..20: mol_type = other RNA
ttaataataaagtagaagca

SEQ ID NO: 9741 - RNA, 20 nt, synthetic construct
  misc_feature 1..20: note = spacer sequence
  source 1..20: mol_type = other RNA
actttattattaaagattta

SEQ ID NO: 9742 - RNA, 20 nt, synthetic construct
  misc_feature 1..20: note = spacer sequence
  source 1..20: mol_type = other RNA
acgtagaaagtcaagagggt

SEQ ID NO: 9743 - RNA, 20 nt, synthetic construct
  misc_feature 1..20: note = spacer sequence
  source 1..20: mol_type = other RNA
acgtggaaaggccccttatt

SEQ ID NO: 9744 - RNA, 20 nt, synthetic construct
  misc_feature 1..20: note = spacer sequence
  source 1..20: mol_type = other RNA
agagggtgaggatggccagg

SEQ ID NO: 9745 - RNA, 20 nt, synthetic construct
  misc_feature 1..20: note = spacer sequence
  source 1..20: mol_type = other RNA
tgactttctacgtggaaagg

SEQ ID NO: 9746 - RNA, 20 nt, synthetic construct
  misc_feature 1..20: note = spacer sequence
  source 1..20: mol_type = other RNA
ccctcttgactttctacgtg

SEQ ID NO: 9747 - RNA, 20 nt, synthetic construct
  misc_feature 1..20: note = spacer sequence
  source 1..20: mol_type = other RNA
tcaccctcttgactttctac

SEQ ID NO: 9748 - RNA, 20 nt, synthetic construct
  misc_feature 1..20: note = spacer sequence
  source 1..20: mol_type = other RNA
tggccatcctcaccctcttg

SEQ ID NO: 9749 - RNA, 20 nt, synthetic construct
  misc_feature 1..20: note = spacer sequence
  source 1..20: mol_type = other RNA
tggctcctggccatcctcac

SEQ ID NO: 9750 - RNA, 20 nt, synthetic construct
  misc_feature 1..20: note = spacer sequence
  source 1..20: mol_type = other RNA
ctttcttggctcctggccat

SEQ ID NO: 9751 - RNA, 20 nt, synthetic construct
  misc_feature 1..20: note = spacer sequence
  source 1..20: mol_type = other RNA
aaatgtatatccaaggcagt

SEQ ID NO: 9752 - RNA, 20 nt, synthetic construct
  misc_feature 1..20: note = spacer sequence
  source 1..20: mol_type = other RNA
aaggcagtctggaactttca

SEQ ID NO: 9753 - RNA, 20 nt, synthetic construct
  misc_feature 1..20: note = spacer sequence
  source 1..20: mol_type = other RNA
ggaactttcatgcaggtaca

SEQ ID NO: 9754 - RNA, 20 nt, synthetic construct
  misc_feature 1..20: note = spacer sequence
  source 1..20: mol_type = other RNA
agactgccttggatatacat

SEQ ID NO: 9755 - RNA, 20 nt, synthetic construct
  misc_feature 1..20: note = spacer sequence
  source 1..20: mol_type = other RNA
tgcaggtacaagaaacttat

SEQ ID NO: 9756 - RNA, 20 nt, synthetic construct
  misc_feature 1..20: note = spacer sequence
  source 1..20: mol_type = other RNA
tgtacctgcatgaaagttcc

SEQ ID NO: 9757 - RNA, 20 nt, synthetic construct
  misc_feature 1..20: note = spacer sequence
  source 1..20: mol_type = other RNA
aagtagccacaagattattt

SEQ ID NO: 9758 - RNA, 20 nt, synthetic construct
  misc_feature 1..20: note = spacer sequence
  source 1..20: mol_type = other RNA
tgtggctactttgacataag

SEQ ID NO: 9759 - RNA, 20 nt, synthetic construct
  misc_feature 1..20: note = spacer sequence
  source 1..20: mol_type = other RNA
taggagatgaacaaatgtga

SEQ ID NO: 9760 - RNA, 20 nt, synthetic construct
  misc_feature 1..20: note = spacer sequence
  source 1..20: mol_type = other RNA
tatgaaataatcttgtggct

SEQ ID NO: 9761 - RNA, 20 nt, synthetic construct
  misc_feature 1..20: note = spacer sequence
  source 1..20: mol_type = other RNA
cctatgaaataatcttgtgg

SEQ ID NO: 9762 - RNA, 20 nt, synthetic construct
  misc_feature 1..20: note = spacer sequence
  source 1..20: mol_type = other RNA
tctcctatgaaataatcttg

SEQ ID NO: 9763 - RNA, 20 nt, synthetic construct
  misc_feature 1..20: note = spacer sequence
  source 1..20: mol_type = other RNA
catttgttcatctcctatga

SEQ ID NO: 9764 - RNA, 20 nt, synthetic construct
  misc_feature 1..20: note = spacer sequence
  source 1..20: mol_type = other RNA
aagctttgtgtgaaatctct

SEQ ID NO: 9765 - RNA, 20 nt, synthetic construct
  misc_feature 1..20: note = spacer sequence
  source 1..20: mol_type = other RNA
cacaaagctttgatttttag

SEQ ID NO: 9766 - RNA, 20 nt, synthetic construct
  misc_feature 1..20: note = spacer sequence
  source 1..20: mol_type = other RNA
ctaatttatggagaagctag

SEQ ID NO: 9767 - RNA, 20 nt, synthetic construct
  misc_feature 1..20: note = spacer sequence
  source 1..20: mol_type = other RNA
aatttatggagaagctaggt

SEQ ID NO: 9768 - RNA, 20 nt, synthetic construct
  misc_feature 1..20: note = spacer sequence
  source 1..20: mol_type = other RNA
ataaattagagatttcacac

SEQ ID NO: 9769 - RNA, 20 nt, synthetic construct
  misc_feature 1..20: note = spacer sequence
  source 1..20: mol_type = other RNA
ccataaattagagatttcac

SEQ ID NO: 9770 - RNA, 20 nt, synthetic construct
  misc_feature 1..20: note = spacer sequence
  source 1..20: mol_type = other RNA
tacctagcttctccataaat

SEQ ID NO: 9771 - RNA, 20 nt, synthetic construct
  misc_feature 1..20: note = spacer sequence
  source 1..20: mol_type = other RNA
cctgtctgttcttttcctga

SEQ ID NO: 9772 - RNA, 20 nt, synthetic construct
  misc_feature 1..20: note = spacer sequence
  source 1..20: mol_type = other RNA
gttcttttcctgatcccttc

SEQ ID NO: 9773 - RNA, 20 nt, synthetic construct
  misc_feature 1..20: note = spacer sequence
  source 1..20: mol_type = other RNA
tttcctgatcccttctcctc

SEQ ID NO: 9774 - RNA, 20 nt, synthetic construct
  misc_feature 1..20: note = spacer sequence
  source 1..20: mol_type = other RNA
tgatcccttctcctcatttc

SEQ ID NO: 9775 - RNA, 20 nt, synthetic construct
  misc_feature 1..20: note = spacer sequence
  source 1..20: mol_type = other RNA
ggaaaagaacagacaggtga

SEQ ID NO: 9776 - RNA, 20 nt, synthetic construct
  misc_feature 1..20: note = spacer sequence
  source 1..20: mol_type = other RNA
cttctcctcatttcctgaaa

SEQ ID NO: 9777 - RNA, 20 nt, synthetic construct
  misc_feature 1..20: note = spacer sequence
  source 1..20: mol_type = other RNA
cctcatttcctgaaatgtag

SEQ ID NO: 9778 - RNA, 20 nt, synthetic construct
  misc_feature 1..20: note = spacer sequence
  source 1..20: mol_type = other RNA
tcatttcctgaaatgtagag

SEQ ID NO: 9779 - RNA, 20 nt, synthetic construct
  misc_feature 1..20: note = spacer sequence
  source 1..20: mol_type = other RNA
tttcctgaaatgtagagact

SEQ ID NO: 9780 - RNA, 20 nt, synthetic construct
  misc_feature 1..20: note = spacer sequence
  source 1..20: mol_type = other RNA
tgaaatgtagagactgaggc

SEQ ID NO: 9781 - RNA, 20 nt, synthetic construct
  misc_feature 1..20: note = spacer sequence
  source 1..20: mol_type = other RNA
ggaaatgaggagaagggatc

SEQ ID NO: 9782 - RNA, 20 nt, synthetic construct
  misc_feature 1..20: note = spacer sequence
  source 1..20: mol_type = other RNA
acatttcaggaaatgaggag

SEQ ID NO: 9783 - RNA, 20 nt, synthetic construct
  misc_feature 1..20: note = spacer sequence
  source 1..20: mol_type = other RNA
ctacatttcaggaaatgagg

SEQ ID NO: 9784 - RNA, 20 nt, synthetic construct
  misc_feature 1..20: note = spacer sequence
  source 1..20: mol_type = other RNA
gtctctacatttcaggaaat

SEQ ID NO: 9785 - RNA, 20 nt, synthetic construct
  misc_feature 1..20: note = spacer sequence
  source 1..20: mol_type = other RNA
ccatcactgtgggggtgggg

SEQ ID NO: 9786 - RNA, 20 nt, synthetic construct
  misc_feature 1..20: note = spacer sequence
  source 1..20: mol_type = other RNA
ctgtgggggtgggggggagc

SEQ ID NO: 9787 - RNA, 20 nt, synthetic construct
  misc_feature 1..20: note = spacer sequence
  source 1..20: mol_type = other RNA
cccccacccccacagtgatg

SEQ ID NO: 9788 - RNA, 20 nt, synthetic construct
  misc_feature 1..20: note = spacer sequence
  source 1..20: mol_type = other RNA
attttgatggttgattttgc

SEQ ID NO: 9789 - RNA, 20 nt, synthetic construct
  misc_feature 1..20: note = spacer sequence
  source 1..20: mol_type = other RNA
aaatagacgctcccccccac

SEQ ID NO: 9790 - RNA, 20 nt, synthetic construct
  misc_feature 1..20: note = spacer sequence
  source 1..20: mol_type = other RNA
accatcaaaatagacgctcc

SEQ ID NO: 9791 - RNA, 20 nt, synthetic construct
  misc_feature 1..20: note = spacer sequence
  source 1..20: mol_type = other RNA
gcaaaatcaaccatcaaaat

SEQ ID NO: 9792 - RNA, 20 nt, synthetic construct
  misc_feature 1..20: note = spacer sequence
  source 1..20: mol_type = other RNA
tttcccattttctaatgatt

SEQ ID NO: 9793 - RNA, 20 nt, synthetic construct
  misc_feature 1..20: note = spacer sequence
  source 1..20: mol_type = other RNA
cattttctaatgattttgta

SEQ ID NO: 9794 - RNA, 20 nt, synthetic construct
  misc_feature 1..20: note = spacer sequence
  source 1..20: mol_type = other RNA
aatgattttgtaacatacaa

SEQ ID NO: 9795 - RNA, 20 nt, synthetic construct
  misc_feature 1..20: note = spacer sequence
  source 1..20: mol_type = other RNA
ttagaaaatgggaaaggaag

SEQ ID NO: 9796 - RNA, 20 nt, synthetic construct
  misc_feature 1..20: note = spacer sequence
  source 1..20: mol_type = other RNA
gtttgtatgttacaaaatca

SEQ ID NO: 9797 - RNA, 20 nt, synthetic construct
  misc_feature 1..20: note = spacer sequence
  source 1..20: mol_type = other RNA
tttcccttcccttctccttc

SEQ ID NO: 9798 - RNA, 20 nt, synthetic construct
  misc_feature 1..20: note = spacer sequence
  source 1..20: mol_type = other RNA
cttcccttctccttcccctg

SEQ ID NO: 9799 - RNA, 20 nt, synthetic construct
  misc_feature 1..20: note = spacer sequence
  source 1..20: mol_type = other RNA
cttctccttcccctgggaaa

SEQ ID NO: 9800 - RNA, 20 nt, synthetic construct
  misc_feature 1..20: note = spacer sequence
  source 1..20: mol_type = other RNA
ccttcccctgggaaaataca

SEQ ID NO: 9801 - RNA, 20 nt, synthetic construct
  misc_feature 1..20: note = spacer sequence
  source 1..20: mol_type = other RNA
ttcccctgggaaaatacaac

SEQ ID NO: 9802 - RNA, 20 nt, synthetic construct
  misc_feature 1..20: note = spacer sequence
  source 1..20: mol_type = other RNA
cctgggaaaatacaacgaat

SEQ ID NO: 9803 - RNA, 20 nt, synthetic construct
  misc_feature 1..20: note = spacer sequence
  source 1..20: mol_type = other RNA
caggggaaggagaagggaag

SEQ ID NO: 9804 - RNA, 20 nt, synthetic construct
  misc_feature 1..20: note = spacer sequence
  source 1..20: mol_type = other RNA
ttgtattttcccaggggaag

SEQ ID NO: 9805 - RNA, 20 nt, synthetic construct
  misc_feature 1..20: note = spacer sequence
  source 1..20: mol_type = other RNA
gtaccagtaagtatttattc

SEQ ID NO: 9806 - RNA, 20 nt, synthetic construct
  misc_feature 1..20: note = spacer sequence
  source 1..20: mol_type = other RNA
aaaaaaaaaaaaagaaagaa

SEQ ID NO: 9807 - RNA, 20 nt, synthetic construct
  misc_feature 1..20: note = spacer sequence
  source 1..20: mol_type = other RNA
tttttttttttttgacagtt

SEQ ID NO: 9808 - RNA, 20 nt, synthetic construct
  misc_feature 1..20: note = spacer sequence
  source 1..20: mol_type = other RNA
ttcttttttttttttttgac

SEQ ID NO: 9809 - RNA, 20 nt, synthetic construct
  misc_feature 1..20: note = spacer sequence
  source 1..20: mol_type = other RNA
ttctttcttttttttttttt

SEQ ID NO: 9810 - RNA, 20 nt, synthetic construct
  misc_feature 1..20: note = spacer sequence
  source 1..20: mol_type = other RNA
ctggtcattaaaagcttaga

SEQ ID NO: 9811 - RNA, 20 nt, synthetic construct
  misc_feature 1..20: note = spacer sequence
  source 1..20: mol_type = other RNA
ggtcattaaaagcttagagt

SEQ ID NO: 9812 - RNA, 20 nt, synthetic construct
  misc_feature 1..20: note = spacer sequence
  source 1..20: mol_type = other RNA
ttaaaagcttagagtaaatt

SEQ ID NO: 9813 - RNA, 20 nt, synthetic construct
  misc_feature 1..20: note = spacer sequence
  source 1..20: mol_type = other RNA
aagcttttaatgaccagaga

SEQ ID NO: 9814 - RNA, 20 nt, synthetic construct
  misc_feature 1..20: note = spacer sequence
  source 1..20: mol_type = other RNA
ttaaaatttactctaagctt

SEQ ID NO: 9815 - RNA, 20 nt, synthetic construct
  misc_feature 1..20: note = spacer sequence
  source 1..20: mol_type = other RNA
ggcttaggtttccttaaaat

SEQ ID NO: 9816 - RNA, 20 nt, synthetic construct
  misc_feature 1..20: note = spacer sequence
  source 1..20: mol_type = other RNA
tctaatgcccccaaaaagca

SEQ ID NO: 9817 - RNA, 20 nt, synthetic construct
  misc_feature 1..20: note = spacer sequence
  source 1..20: mol_type = other RNA
aatgcccccaaaaagcactt

SEQ ID NO: 9818 - RNA, 20 nt, synthetic construct
  misc_feature 1..20: note = spacer sequence
  source 1..20: mol_type = other RNA
gttttagatgatgcctaggc

SEQ ID NO: 9819 - RNA, 20 nt, synthetic construct
  misc_feature 1..20: note = spacer sequence
  source 1..20: mol_type = other RNA
aaaacagatatgaccctttt

SEQ ID NO: 9820 - RNA, 20 nt, synthetic construct
  misc_feature 1..20: note = spacer sequence
  source 1..20: mol_type = other RNA
tctaaaacagatatgaccct

SEQ ID NO: 9821 - RNA, 20 nt, synthetic construct
  misc_feature 1..20: note = spacer sequence
  source 1..20: mol_type = other RNA
tggcctaggcatcatctaaa

SEQ ID NO: 9822 - RNA, 20 nt, synthetic construct
  misc_feature 1..20: note = spacer sequence
  source 1..20: mol_type = other RNA
gaactaatatttgttgattc

SEQ ID NO: 9823 - RNA, 20 nt, synthetic construct
  misc_feature 1..20: note = spacer sequence
  source 1..20: mol_type = other RNA
gatcatggcctaggcatcat

SEQ ID NO: 9824 - RNA, 20 nt, synthetic construct
  misc_feature 1..20: note = spacer sequence
  source 1..20: mol_type = other RNA
acaaatattagttcagatca

SEQ ID NO: 9825 - RNA, 20 nt, synthetic construct
  misc_feature 1..20: note = spacer sequence
  source 1..20: mol_type = other RNA
aaagttcacactccctaaca

SEQ ID NO: 9826 - RNA, 20 nt, synthetic construct
  misc_feature 1..20: note = spacer sequence
  source 1..20: mol_type = other RNA
cactccctaacaacataccc

SEQ ID NO: 9827 - RNA, 20 nt, synthetic construct
  misc_feature 1..20: note = spacer sequence
  source 1..20: mol_type = other RNA
ctaacaacatacccataccc

SEQ ID NO: 9828 - RNA, 20 nt, synthetic construct
  misc_feature 1..20: note = spacer sequence
  source 1..20: mol_type = other RNA
ctgcaaccttcgcctcctga

SEQ ID NO: 9829 - RNA, 20 nt, synthetic construct
  misc_feature 1..20: note = spacer sequence
  source 1..20: mol_type = other RNA
gctcactgcaaccttcgcct

SEQ ID NO: 9830 - RNA, 20 nt, synthetic construct
  misc_feature 1..20: note = spacer sequence
  source 1..20: mol_type = other RNA
cggctcactgcaaccttcgc

SEQ ID NO: 9831 - RNA, 20 nt, synthetic construct
  misc_feature 1..20: note = spacer sequence
  source 1..20: mol_type = other RNA
agcctgggatacagaccgag

SEQ ID NO: 9832 - RNA, 20 nt, synthetic construct
  misc_feature 1..20: note = spacer sequence
  source 1..20: mol_type = other RNA
caggctggagtgtagtggca

SEQ ID NO: 9833 - RNA, 20 nt, synthetic construct
  misc_feature 1..20: note = spacer sequence
  source 1..20: mol_type = other RNA
gtatcccaggctggagtgta

SEQ ID NO: 9834 - RNA, 20 nt, synthetic construct
  misc_feature 1..20: note = spacer sequence
  source 1..20: mol_type = other RNA
gtctgtatcccaggctggag

SEQ ID NO: 9835 - RNA, 20 nt, synthetic construct
  misc_feature 1..20: note = spacer sequence
  source 1..20: mol_type = other RNA
cggtctgtatcccaggctgg

SEQ ID NO: 9836 - RNA, 20 nt, synthetic construct
  misc_feature 1..20: note = spacer sequence
  source 1..20: mol_type = other RNA
gtctccaaaaacaaaaaaca

SEQ ID NO: 9837 - RNA, 20 nt, synthetic construct
  misc_feature 1..20: note = spacer sequence
  source 1..20: mol_type = other RNA
ccaaaaacaaaaaacaaaca

SEQ ID NO: 9838 - RNA, 20 nt, synthetic construct
  misc_feature 1..20: note = spacer sequence
  source 1..20: mol_type = other RNA
aaaaacaaaaaacaaacaaa

SEQ ID NO: 9839 - RNA, 20 nt, synthetic construct
  misc_feature 1..20: note = spacer sequence
  source 1..20: mol_type = other RNA
gttttgtggtttttttgttt

SEQ ID NO: 9840 - RNA, 20 nt, synthetic construct
  misc_feature 1..20: note = spacer sequence
  source 1..20: mol_type = other RNA
tctgttttgtggtttttttg

SEQ ID NO: 9841 - RNA, 20 nt, synthetic construct
  misc_feature 1..20: note = spacer sequence
  source 1..20: mol_type = other RNA
atgtagcagagaaaaaacct

SEQ ID NO: 9842 - RNA, 20 nt, synthetic construct
  misc_feature 1..20: note = spacer sequence
  source 1..20: mol_type = other RNA
gctacattgaaatttttggt

SEQ ID NO: 9843 - RNA, 20 nt, synthetic construct
  misc_feature 1..20: note = spacer sequence
  source 1..20: mol_type = other RNA
ctgctacattgaaatttttg

SEQ ID NO: 9844 - RNA, 20 nt, synthetic construct
  misc_feature 1..20: note = spacer sequence
  source 1..20: mol_type = other RNA
tttttgcaggttttttctct

SEQ ID NO: 9845 - RNA, 20 nt, synthetic construct
  misc_feature 1..20: note = spacer sequence
  source 1..20: mol_type = other RNA
tggtgctcatttttgcaggt

SEQ ID NO: 9846 - RNA, 20 nt, synthetic construct
  misc_feature 1..20: note = spacer sequence
  source 1..20: mol_type = other RNA
actttgtcctggtgctcatt

SEQ ID NO: 9847 - RNA, 20 nt, synthetic construct
  misc_feature 1..20: note = spacer sequence
  source 1..20: mol_type = other RNA
cagaaattagagacatctgg

SEQ ID NO: 9848 - RNA, 20 nt, synthetic construct
  misc_feature 1..20: note = spacer sequence
  source 1..20: mol_type = other RNA
gggattctactttgtcctgg

SEQ ID NO: 9849 - RNA, 20 nt, synthetic construct
  misc_feature 1..20: note = spacer sequence
  source 1..20: mol_type = other RNA
aatttctgggattctacttt

SEQ ID NO: 9850 - RNA, 20 nt, synthetic construct
  misc_feature 1..20: note = spacer sequence
  source 1..20: mol_type = other RNA
ctaatttctgggattctact

SEQ ID NO: 9851 - RNA, 20 nt, synthetic construct
  misc_feature 1..20: note = spacer sequence
  source 1..20: mol_type = other RNA
ggcatagccaaatgctacaa

SEQ ID NO: 9852 - RNA, 20 nt, synthetic construct
  misc_feature 1..20: note = spacer sequence
  source 1..20: mol_type = other RNA
tgtagcatttggctatgcca

SEQ ID NO: 9853 - RNA, 20 nt, synthetic construct
  misc_feature 1..20: note = spacer sequence
  source 1..20: mol_type = other RNA
ggatgcaaaacaaatcttgt

SEQ ID NO: 9854 - RNA, 20 nt, synthetic construct
  misc_feature 1..20: note = spacer sequence
  source 1..20: mol_type = other RNA
tgattaacctcttgtagcat

SEQ ID NO: 9855 - RNA, 20 nt, synthetic construct
  misc_feature 1..20: note = spacer sequence
  source 1..20: mol_type = other RNA
tgtttatttagtttggcaat

SEQ ID NO: 9856 - RNA, 20 nt, synthetic construct
  misc_feature 1..20: note = spacer sequence
  source 1..20: mol_type = other RNA
cctaattgccaaactaaata

SEQ ID NO: 9857 - RNA, 20 nt, synthetic construct
  misc_feature 1..20: note = spacer sequence
  source 1..20: mol_type = other RNA
cttgcattcacctaattgcc

SEQ ID NO: 9858 - RNA, 20 nt, synthetic construct
  misc_feature 1..20: note = spacer sequence
  source 1..20: mol_type = other RNA
gtttttgaaagtgattccaa

SEQ ID NO: 9859 - RNA, 20 nt, synthetic construct
  misc_feature 1..20: note = spacer sequence
  source 1..20: mol_type = other RNA
aaaactgatgtcacttgcat

SEQ ID NO: 9860 - RNA, 20 nt, synthetic construct
  misc_feature 1..20: note = spacer sequence
  source 1..20: mol_type = other RNA
ctttcaaaaactgatgtcac

SEQ ID NO: 9861 - RNA, 20 nt, synthetic construct
  misc_feature 1..20: note = spacer sequence
  source 1..20: mol_type = other RNA
aaattccaactggttaagga

SEQ ID NO: 9862 - RNA, 20 nt, synthetic construct
  misc_feature 1..20: note = spacer sequence
  source 1..20: mol_type = other RNA
aactggttaaggaatgagtg

SEQ ID NO: 9863 - RNA, 20 nt, synthetic construct
  misc_feature 1..20: note = spacer sequence
  source 1..20: mol_type = other RNA
ttaaccagttggaatttgga

SEQ ID NO: 9864 - RNA, 20 nt, synthetic construct
  misc_feature 1..20: note = spacer sequence
  source 1..20: mol_type = other RNA
ttccttaaccagttggaatt

SEQ ID NO: 9865 - RNA, 20 nt, synthetic construct
  misc_feature 1..20: note = spacer sequence
  source 1..20: mol_type = other RNA
ttgcctgccactcattcctt

SEQ ID NO: 9866 - RNA, 20 nt, synthetic construct
  misc_feature 1..20: note = spacer sequence
  source 1..20: mol_type = other RNA
gtttccttgcctgccactca

SEQ ID NO: 9867 - RNA, 20 nt, synthetic construct
  misc_feature 1..20: note = spacer sequence
  source 1..20: mol_type = other RNA
tttttcattaattcaacaaa

SEQ ID NO: 9868 - RNA, 20 nt, synthetic construct
  misc_feature 1..20: note = spacer sequence
  source 1..20: mol_type = other RNA
ttaattcaacaaatatctga

SEQ ID NO: 9869 - RNA, 20 nt, synthetic construct
  misc_feature 1..20: note = spacer sequence
  source 1..20: mol_type = other RNA
acaaatatctgagagcttag

SEQ ID NO: 9870 - RNA, 20 nt, synthetic construct
  misc_feature 1..20: note = spacer sequence
  source 1..20: mol_type = other RNA
gagagcttagtaagtggcaa

SEQ ID NO: 9871 - RNA, 20 nt, synthetic construct
  misc_feature 1..20: note = spacer sequence
  source 1..20: mol_type = other RNA
gatatttgttgaattaatga

SEQ ID NO: 9872 - RNA, 20 nt, synthetic construct
  misc_feature 1..20: note = spacer sequence
  source 1..20: mol_type = other RNA
cagatatttgttgaattaat

SEQ ID NO: 9873 - RNA, 20 nt, synthetic construct
  misc_feature 1..20: note = spacer sequence
  source 1..20: mol_type = other RNA
gcttgccacttactaagctc

SEQ ID NO: 9874 - RNA, 20 nt, synthetic construct
  misc_feature 1..20: note = spacer sequence
  source 1..20: mol_type = other RNA
tatataaaaaggagacagga

SEQ ID NO: 9875 - RNA, 20 nt, synthetic construct
  misc_feature 1..20: note = spacer sequence
  source 1..20: mol_type = other RNA
tttttatatacgaaacactc

SEQ ID NO: 9876 - RNA, 20 nt, synthetic construct
  misc_feature 1..20: note = spacer sequence
  source 1..20: mol_type = other RNA
cctttttatatacgaaacac

SEQ ID NO: 9877 - RNA, 20 nt, synthetic construct
  misc_feature 1..20: note = spacer sequence
  source 1..20: mol_type = other RNA
tgtctcctttttatatacga

SEQ ID NO: 9878 - RNA, 20 nt, synthetic construct
  misc_feature 1..20: note = spacer sequence
  source 1..20: mol_type = other RNA
aagcttttttataaatgacc

SEQ ID NO: 9879 - RNA, 20 nt, synthetic construct
  misc_feature 1..20: note = spacer sequence
  source 1..20: mol_type = other RNA
tttataaaaaagctttgaaa

SEQ ID NO: 9880 - RNA, 20 nt, synthetic construct
  misc_feature 1..20: note = spacer sequence
  source 1..20: mol_type = other RNA
tatttgttagcattataaag

SEQ ID NO: 9881 - RNA, 20 nt, synthetic construct
  misc_feature 1..20: note = spacer sequence
  source 1..20: mol_type = other RNA
atcacatcactttctttctt

SEQ ID NO: 9882 - RNA, 20 nt, synthetic construct
  misc_feature 1..20: note = spacer sequence
  source 1..20: mol_type = other RNA
catcactttctttctttttt

SEQ ID NO: 9883 - RNA, 20 nt, synthetic construct
  misc_feature 1..20: note = spacer sequence
  source 1..20: mol_type = other RNA
ctttctttctttttttaaac

SEQ ID NO: 9884 - RNA, 20 nt, synthetic construct
  misc_feature 1..20: note = spacer sequence
  source 1..20: mol_type = other RNA
ttctttttttaaactcctga

SEQ ID NO: 9885 - RNA, 20 nt, synthetic construct
  misc_feature 1..20: note = spacer sequence
  source 1..20: mol_type = other RNA
ttttttaaactcctgagttc

SEQ ID NO: 9886 - RNA, 20 nt, synthetic construct
  misc_feature 1..20: note = spacer sequence
  source 1..20: mol_type = other RNA
tgagttcaagtgatcctccc

SEQ ID NO: 9887 - RNA, 20 nt, synthetic construct
  misc_feature 1..20: note = spacer sequence
  source 1..20: mol_type = other RNA
ggagtttaaaaaaagaaaga

SEQ ID NO: 9888 - RNA, 20 nt, synthetic construct
  misc_feature 1..20: note = spacer sequence
  source 1..20: mol_type = other RNA
agtgatcctcccatctcagc

SEQ ID NO: 9889 - RNA, 20 nt, synthetic construct
  misc_feature 1..20: note = spacer sequence
  source 1..20: mol_type = other RNA
cttgaactcaggagtttaaa

SEQ ID NO: 9890 - RNA, 20 nt, synthetic construct
  misc_feature 1..20: note = spacer sequence
  source 1..20: mol_type = other RNA
tcccatctcagcttccccag

SEQ ID NO: 9891 - RNA, 20 nt, synthetic construct
  misc_feature 1..20: note = spacer sequence
  source 1..20: mol_type = other RNA
catctcagcttccccagcag

SEQ ID NO: 9892 - RNA, 20 nt, synthetic construct
  misc_feature 1..20: note = spacer sequence
  source 1..20: mol_type = other RNA
cagcttccccagcagctgga

SEQ ID NO: 9893 - RNA, 20 nt, synthetic construct
  misc_feature 1..20: note = spacer sequence
  source 1..20: mol_type = other RNA
gcttccccagcagctggaac

SEQ ID NO: 9894 - RNA, 20 nt, synthetic construct
  misc_feature 1..20: note = spacer sequence
  source 1..20: mol_type = other RNA
ccagcagctggaactatagg

SEQ ID NO: 9895 - RNA, 20 nt, synthetic construct
  misc_feature 1..20: note = spacer sequence
  source 1..20: mol_type = other RNA
agctgctggggaagctgaga

SEQ ID NO: 9896 - RNA, 20 nt, synthetic construct
  misc_feature 1..20: note = spacer sequence
  source 1..20: mol_type = other RNA
ggtggggtggcacatgccta

SEQ ID NO: 9897 - RNA, 20 nt, synthetic construct
  misc_feature 1..20: note = spacer sequence
  source 1..20: mol_type = other RNA
ctggtggggtggcacatgcc

SEQ ID NO: 9898 - RNA, 20 nt, synthetic construct
  misc_feature 1..20: note = spacer sequence
  source 1..20: mol_type = other RNA
tttgggatgacttttattct

SEQ ID NO: 9899 - RNA, 20 nt, synthetic construct
  misc_feature 1..20: note = spacer sequence
  source 1..20: mol_type = other RNA
caaaagaaacttctctggtg

SEQ ID NO: 9900 - RNA, 20 nt, synthetic construct
  misc_feature 1..20: note = spacer sequence
  source 1..20: mol_type = other RNA
tcccaaaagaaacttctctg

SEQ ID NO: 9901 - RNA, 20 nt, synthetic construct
  misc_feature 1..20: note = spacer sequence
  source 1..20: mol_type = other RNA
cctttaccaacatttttctt

SEQ ID NO: 9902 - RNA, 20 nt, synthetic construct
  misc_feature 1..20: note = spacer sequence
  source 1..20: mol_type = other RNA
tttaccaacatttttcttaa

SEQ ID NO: 9903 - RNA, 20 nt, synthetic construct
  misc_feature 1..20: note = spacer sequence
  source 1..20: mol_type = other RNA
taaaatttcaagctgtgcat

SEQ ID NO: 9904 - RNA, 20 nt, synthetic construct
  misc_feature 1..20: note = spacer sequence
  source 1..20: mol_type = other RNA
agctgtgcatttgcatttga

SEQ ID NO: 9905 - RNA, 20 nt, synthetic construct
  misc_feature 1..20: note = spacer sequence
  source 1..20: mol_type = other RNA
aatgcaaatgcacagcttga

SEQ ID NO: 9906 - RNA, 20 nt, synthetic construct
  misc_feature 1..20: note = spacer sequence
  source 1..20: mol_type = other RNA
taaattatatcaaatgcaaa

SEQ ID NO: 9907 - RNA, 20 nt, synthetic construct
  misc_feature 1..20: note = spacer sequence
  source 1..20: mol_type = other RNA
tcgtaaattatatcaaatgc

SEQ ID NO: 9908 - RNA, 20 nt, synthetic construct
  misc_feature 1..20: note = spacer sequence
  source 1..20: mol_type = other RNA
ctgtagtgtttttcttcgta

SEQ ID NO: 9909 - RNA, 20 nt, synthetic construct
  misc_feature 1..20: note = spacer sequence
  source 1..20: mol_type = other RNA
gtatttccctgtagtgtttt

SEQ ID NO: 9910 - RNA, 20 nt, synthetic construct
  misc_feature 1..20: note = spacer sequence
  source 1..20: mol_type = other RNA
aaattggaggtttgcaaaat

SEQ ID NO: 9911 - RNA, 20 nt, synthetic construct
  misc_feature 1..20: note = spacer sequence
  source 1..20: mol_type = other RNA
aattttgaaaaatctgtatt

SEQ ID NO: 9912 - RNA, 20 nt, synthetic construct
  misc_feature 1..20: note = spacer sequence
  source 1..20: mol_type = other RNA
ccttttaacagtcaatgaat

SEQ ID NO: 9913 - RNA, 20 nt, synthetic construct
  misc_feature 1..20: note = spacer sequence
  source 1..20: mol_type = other RNA
atgaatgctgttaatatttt

SEQ ID NO: 9914 - RNA, 20 nt, synthetic construct
  misc_feature 1..20: note = spacer sequence
  source 1..20: mol_type = other RNA
ttgactgttaaaaggtgatt

SEQ ID NO: 9915 - RNA, 20 nt, synthetic construct
  misc_feature 1..20: note = spacer sequence
  source 1..20: mol_type = other RNA
ataaaatattaacagcattc

SEQ ID NO: 9916 - RNA, 20 nt, synthetic construct
  misc_feature 1..20: note = spacer sequence
  source 1..20: mol_type = other RNA
ccaaacggtctctacctttt

SEQ ID NO: 9917 - RNA, 20 nt, synthetic construct
  misc_feature 1..20: note = spacer sequence
  source 1..20: mol_type = other RNA
ctaccttttgcaagacaaaa

SEQ ID NO: 9918 - RNA, 20 nt, synthetic construct
  misc_feature 1..20: note = spacer sequence
  source 1..20: mol_type = other RNA
accttttgcaagacaaaaaa

SEQ ID NO: 9919 - RNA, 20 nt, synthetic construct
  misc_feature 1..20: note = spacer sequence
  source 1..20: mol_type = other RNA
tgcaaaaggtagagaccgtt

SEQ ID NO: 9920 - RNA, 20 nt, synthetic construct
  misc_feature 1..20: note = spacer sequence
  source 1..20: mol_type = other RNA
tgctgacactttcttcctaa

SEQ ID NO: 9921 - RNA, 20 nt, synthetic construct
  misc_feature 1..20: note = spacer sequence
  source 1..20: mol_type = other RNA
aaataaatcatgctgacact

SEQ ID NO: 9922 - RNA, 20 nt, synthetic construct
  misc_feature 1..20: note = spacer sequence
  source 1..20: mol_type = other RNA
tctaaataaatcatgctgac

SEQ ID NO: 9923 - RNA, 20 nt, synthetic construct
  misc_feature 1..20: note = spacer sequence
  source 1..20: mol_type = other RNA
aaatactgatcaaatttcaa

SEQ ID NO: 9924 - RNA, 20 nt, synthetic construct
  misc_feature 1..20: note = spacer sequence
  source 1..20: mol_type = other RNA
gtattttgatcatctaaata

SEQ ID NO: 9925 - RNA, 20 nt, synthetic construct
  misc_feature 1..20: note = spacer sequence
  source 1..20: mol_type = other RNA
aatttcaatttctcaagact

SEQ ID NO: 9926 - RNA, 20 nt, synthetic construct
  misc_feature 1..20: note = spacer sequence
  source 1..20: mol_type = other RNA
atttctcaagactaaaggtc

SEQ ID NO: 9927 - RNA, 20 nt, synthetic construct
  misc_feature 1..20: note = spacer sequence
  source 1..20: mol_type = other RNA
caagactaaaggtcaataca

SEQ ID NO: 9928 - RNA, 20 nt, synthetic construct
  misc_feature 1..20: note = spacer sequence
  source 1..20: mol_type = other RNA
agactaaaggtcaatacact

SEQ ID NO: 9929 - RNA, 20 nt, synthetic construct
  misc_feature 1..20: note = spacer sequence
  source 1..20: mol_type = other RNA
tgagaaattgaaatttgatc

SEQ ID NO: 9930 - RNA, 20 nt, synthetic construct
  misc_feature 1..20: note = spacer sequence
  source 1..20: mol_type = other RNA
atacactgtttttatgtttt

SEQ ID NO: 9931 - RNA, 20 nt, synthetic construct
  misc_feature 1..20: note = spacer sequence
  source 1..20: mol_type = other RNA
aaaacataaaaacagtgtat

SEQ ID NO: 9932 - RNA, 20 nt, synthetic construct
  misc_feature 1..20: note = spacer sequence
  source 1..20: mol_type = other RNA
gaatgtataacatgctggct

SEQ ID NO: 9933 - RNA, 20 nt, synthetic construct
  misc_feature 1..20: note = spacer sequence
  source 1..20: mol_type = other RNA
tatttctgaatattgactca

SEQ ID NO: 9934 - RNA, 20 nt, synthetic construct
  misc_feature 1..20: note = spacer sequence
  source 1..20: mol_type = other RNA
gaatattgactcatccaaat

SEQ ID NO: 9935 - RNA, 20 nt, synthetic construct
  misc_feature 1..20: note = spacer sequence
  source 1..20: mol_type = other RNA
gaaataagaatttctgaatg

SEQ ID NO: 9936 - RNA, 20 nt, synthetic construct
  misc_feature 1..20: note = spacer sequence
  source 1..20: mol_type = other RNA
atattcagaaataagaattt

SEQ ID NO: 9937 - RNA, 20 nt, synthetic construct
  misc_feature 1..20: note = spacer sequence
  source 1..20: mol_type = other RNA
tccaaatatttccaggtaag

SEQ ID NO: 9938 - RNA, 20 nt, synthetic construct
  misc_feature 1..20: note = spacer sequence
  source 1..20: mol_type = other RNA
aaatatttccaggtaagaca

SEQ ID NO: 9939 - RNA, 20 nt, synthetic construct
  misc_feature 1..20: note = spacer sequence
  source 1..20: mol_type = other RNA
aggtaagacatgggccctct

SEQ ID NO: 9940 - RNA, 20 nt, synthetic construct
  misc_feature 1..20: note = spacer sequence
  source 1..20: mol_type = other RNA
tacctggaaatatttggatg

SEQ ID NO: 9941 - RNA, 20 nt, synthetic construct
  misc_feature 1..20: note = spacer sequence
  source 1..20: mol_type = other RNA
actgttgccagttctgctga

SEQ ID NO: 9942 - RNA, 20 nt, synthetic construct
  misc_feature 1..20: note = spacer sequence
  source 1..20: mol_type = other RNA
gctgagtttgattctcccat

SEQ ID NO: 9943 - RNA, 20 nt, synthetic construct
  misc_feature 1..20: note = spacer sequence
  source 1..20: mol_type = other RNA
gcagaactggcaacagtaga

SEQ ID NO: 9944 - RNA, 20 nt, synthetic construct
  misc_feature 1..20: note = spacer sequence
  source 1..20: mol_type = other RNA
aactcagcagaactggcaac

SEQ ID NO: 9945 - RNA, 20 nt, synthetic construct
  misc_feature 1..20: note = spacer sequence
  source 1..20: mol_type = other RNA
tgctattaacagttttataa

SEQ ID NO: 9946 - RNA, 20 nt, synthetic construct
  misc_feature 1..20: note = spacer sequence
  source 1..20: mol_type = other RNA
tttcatgctattaacagttt

SEQ ID NO: 9947 - RNA, 20 nt, synthetic construct
  misc_feature 1..20: note = spacer sequence
  source 1..20: mol_type = other RNA
aaaataatcagtgcttaata

SEQ ID NO: 9948 - RNA, 20 nt, synthetic construct
  misc_feature 1..20: note = spacer sequence
  source 1..20: mol_type = other RNA
gtgcttaataaatgtcttgg

SEQ ID NO: 9949 - RNA, 20 nt, synthetic construct
  misc_feature 1..20: note = spacer sequence
  source 1..20: mol_type = other RNA
tggtctctaactcctacccc

SEQ ID NO: 9950 - RNA, 20 nt, synthetic construct
  misc_feature 1..20: note = spacer sequence
  source 1..20: mol_type = other RNA
ctaactcctaccccctctca

SEQ ID NO: 9951 - RNA, 20 nt, synthetic construct
  misc_feature 1..20: note = spacer sequence
  source 1..20: mol_type = other RNA
aactcctaccccctctcaca

SEQ ID NO: 9952 - RNA, 20 nt, synthetic construct
  misc_feature 1..20: note = spacer sequence
  source 1..20: mol_type = other RNA
taccccctctcacatacacc

SEQ ID NO: 9953 - RNA, 20 nt, synthetic construct
  misc_feature 1..20: note = spacer sequence
  source 1..20: mol_type = other RNA
cacatacaccaatccccgac

SEQ ID NO: 9954 - RNA, 20 nt, synthetic construct
  misc_feature 1..20: note = spacer sequence
  source 1..20: mol_type = other RNA
catacaccaatccccgactt

SEQ ID NO: 9955 - RNA, 20 nt, synthetic construct
  misc_feature 1..20: note = spacer sequence
  source 1..20: mol_type = other RNA
taaataaaagagttaattgt

SEQ ID NO: 9956 - RNA, 20 nt, synthetic construct
  misc_feature 1..20: note = spacer sequence
  source 1..20: mol_type = other RNA
tttatttaagattaataaat

SEQ ID NO: 9957 - RNA, 20 nt, synthetic construct
  misc_feature 1..20: note = spacer sequence
  source 1..20: mol_type = other RNA
tggtcaccaatattgtttga

SEQ ID NO: 9958 - RNA, 20 nt, synthetic construct
  misc_feature 1..20: note = spacer sequence
  source 1..20: mol_type = other RNA
ccaatattgtttgaggaatc

SEQ ID NO: 9959 - RNA, 20 nt, synthetic construct
  misc_feature 1..20: note = spacer sequence
  source 1..20: mol_type = other RNA
aacaatattggtgaccatga

SEQ ID NO: 9960 - RNA, 20 nt, synthetic construct
  misc_feature 1..20: note = spacer sequence
  source 1..20: mol_type = other RNA
tcaaacaatattggtgacca

SEQ ID NO: 9961 - RNA, 20 nt, synthetic construct
  misc_feature 1..20: note = spacer sequence
  source 1..20: mol_type = other RNA
ctcaagagaagtatataatg

SEQ ID NO: 9962 - RNA, 20 nt, synthetic construct
  misc_feature 1..20: note = spacer sequence
  source 1..20: mol_type = other RNA
caagagaagtatataatgtt

SEQ ID NO: 9963 - RNA, 20 nt, synthetic construct
  misc_feature 1..20: note = spacer sequence
  source 1..20: mol_type = other RNA
agagaagtatataatgttgt

SEQ ID NO: 9964 - RNA, 20 nt, synthetic construct
  misc_feature 1..20: note = spacer sequence
  source 1..20: mol_type = other RNA
tgagagattcctcaaacaat

SEQ ID NO: 9965 - RNA, 20 nt, synthetic construct
  misc_feature 1..20: note = spacer sequence
  source 1..20: mol_type = other RNA
cttgagagattcctcaaaca

SEQ ID NO: 9966 - RNA, 20 nt, synthetic construct
  misc_feature 1..20: note = spacer sequence
  source 1..20: mol_type = other RNA
ccacaacattatatacttct

SEQ ID NO: 9967 - RNA, 20 nt, synthetic construct
  misc_feature 1..20: note = spacer sequence
  source 1..20: mol_type = other RNA
aagattttgattgattttcc

SEQ ID NO: 9968 - RNA, 20 nt, synthetic construct
  misc_feature 1..20: note = spacer sequence
  source 1..20: mol_type = other RNA
ccattttacagatggaggaa

SEQ ID NO: 9969 - RNA, 20 nt, synthetic construct
  misc_feature 1..20: note = spacer sequence
  source 1..20: mol_type = other RNA
ctccttatttagttaagtct

SEQ ID NO: 9970 - RNA, 20 nt, synthetic construct
  misc_feature 1..20: note = spacer sequence
  source 1..20: mol_type = other RNA
ttatttagttaagtctaaga

SEQ ID NO: 9971 - RNA, 20 nt, synthetic construct
  misc_feature 1..20: note = spacer sequence
  source 1..20: mol_type = other RNA
aagaattaaatacaaacaat

SEQ ID NO: 9972 - RNA, 20 nt, synthetic construct
  misc_feature 1..20: note = spacer sequence
  source 1..20: mol_type = other RNA
tagacttaactaaataagga

SEQ ID NO: 9973 - RNA, 20 nt, synthetic construct
  misc_feature 1..20: note = spacer sequence
  source 1..20: mol_type = other RNA
aagtgcttttgtatgtattg

SEQ ID NO: 9974 - RNA, 20 nt, synthetic construct
  misc_feature 1..20: note = spacer sequence
  source 1..20: mol_type = other RNA
ctgccccccccaccccaccc

SEQ ID NO: 9975 - RNA, 20 nt, synthetic construct
  misc_feature 1..20: note = spacer sequence
  source 1..20: mol_type = other RNA
tccctgccccccccacccca

SEQ ID NO: 9976 - RNA, 20 nt, synthetic construct
  misc_feature 1..20: note = spacer sequence
  source 1..20: mol_type = other RNA
gaaaaaaacttcatgttttt

SEQ ID NO: 9977 - RNA, 20 nt, synthetic construct
  misc_feature 1..20: note = spacer sequence
  source 1..20: mol_type = other RNA
gacatggcagtgcttcttcc

SEQ ID NO: 9978 - RNA, 20 nt, synthetic construct
  misc_feature 1..20: note = spacer sequence
  source 1..20: mol_type = other RNA
tgtttttcaatcaagtttag

SEQ ID NO: 9979 - RNA, 20 nt, synthetic construct
  misc_feature 1..20: note = spacer sequence
  source 1..20: mol_type = other RNA
atcaagtttagatacacata

SEQ ID NO: 9980 - RNA, 20 nt, synthetic construct
  misc_feature 1..20: note = spacer sequence
  source 1..20: mol_type = other RNA
agtttagatacacataagta

SEQ ID NO: 9981 - RNA, 20 nt, synthetic construct
  misc_feature 1..20: note = spacer sequence
  source 1..20: mol_type = other RNA
aaacttgattgaaaaacatg

SEQ ID NO: 9982 - RNA, 20 nt, synthetic construct
  misc_feature 1..20: note = spacer sequence
  source 1..20: mol_type = other RNA
atatacaaaaactcatttag

SEQ ID NO: 9983 - RNA, 20 nt, synthetic construct
  misc_feature 1..20: note = spacer sequence
  source 1..20: mol_type = other RNA
ttccatatacaaaaactcat

SEQ ID NO: 9984 - RNA, 20 nt, synthetic construct
  misc_feature 1..20: note = spacer sequence
  source 1..20: mol_type = other RNA
tactatgtcaccccgcagag

SEQ ID NO: 9985 - RNA, 20 nt, synthetic construct
  misc_feature 1..20: note = spacer sequence
  source 1..20: mol_type = other RNA
ccccgcagaggacaagtatt

SEQ ID NO: 9986 - RNA, 20 nt, synthetic construct
  misc_feature 1..20: note = spacer sequence
  source 1..20: mol_type = other RNA
gcggggtgacatagtacgag

SEQ ID NO: 9987 - RNA, 20 nt, synthetic construct
  misc_feature 1..20: note = spacer sequence
  source 1..20: mol_type = other RNA
tctgcggggtgacatagtac

SEQ ID NO: 9988 - RNA, 20 nt, synthetic construct
  misc_feature 1..20: note = spacer sequence
  source 1..20: mol_type = other RNA
ataaacaccgttaggtgcag

SEQ ID NO: 9989 - RNA, 20 nt, synthetic construct
  misc_feature 1..20: note = spacer sequence
  source 1..20: mol_type = other RNA
gcacctaacggtgtttattg

SEQ ID NO: 9990 - RNA, 20 nt, synthetic construct
  misc_feature 1..20: note = spacer sequence
  source 1..20: mol_type = other RNA
cccaacattatagcctgtat

SEQ ID NO: 9991 - RNA, 20 nt, synthetic construct
  misc_feature 1..20: note = spacer sequence
  source 1..20: mol_type = other RNA
caattaatgttatctgtgaa

SEQ ID NO: 9992 - RNA, 20 nt, synthetic construct
  misc_feature 1..20: note = spacer sequence
  source 1..20: mol_type = other RNA
gtgaatgaataaaaagtgtc

SEQ ID NO: 9993 - RNA, 20 nt, synthetic construct
  misc_feature 1..20: note = spacer sequence
  source 1..20: mol_type = other RNA
cagataacattaattgtgaa

SEQ ID NO: 9994 - RNA, 20 nt, synthetic construct
  misc_feature 1..20: note = spacer sequence
  source 1..20: mol_type = other RNA
ttcacagataacattaattg

SEQ ID NO: 9995 - RNA, 20 nt, synthetic construct
  misc_feature 1..20: note = spacer sequence
  source 1..20: mol_type = other RNA
aagcagccagagaaaaccat

SEQ ID NO: 9996 - RNA, 20 nt, synthetic construct
  misc_feature 1..20: note = spacer sequence
  source 1..20: mol_type = other RNA
ggctgctttgacacttttta

SEQ ID NO: 9997 - RNA, 20 nt, synthetic construct
  misc_feature 1..20: note = spacer sequence
  source 1..20: mol_type = other RNA
ctggctgctttgacactttt

SEQ ID NO: 9998 - RNA, 20 nt, synthetic construct
  misc_feature 1..20: note = spacer sequence
  source 1..20: mol_type = other RNA
tggttttctctggctgcttt

SEQ ID NO: 9999 - RNA, 20 nt, synthetic construct
  misc_feature 1..20: note = spacer sequence
  source 1..20: mol_type = other RNA
tcctgcataaaaataacaac

SEQ ID NO: 10000 - RNA, 20 nt, synthetic construct
  misc_feature 1..20: note = spacer sequence
  source 1..20: mol_type = other RNA
tgcataaaaataacaacagc

SEQ ID NO: 10001 - RNA, 20 nt, synthetic construct
  misc_feature 1..20: note = spacer sequence
  source 1..20: mol_type = other RNA
aaatacaagacttctttaga

SEQ ID NO: 10002 - RNA, 20 nt, synthetic construct
  misc_feature 1..20: note = spacer sequence
  source 1..20: mol_type = other RNA
tgtatttggaggggctgttg

SEQ ID NO: 10003 - RNA, 20 nt, synthetic construct
  misc_feature 1..20: note = spacer sequence
  source 1..20: mol_type = other RNA
ttagaagggataagcatagt

SEQ ID NO: 10004 - RNA, 20 nt, synthetic construct
  misc_feature 1..20: note = spacer sequence
  source 1..20: mol_type = other RNA
aaagaagtcttgtatttgga

SEQ ID NO: 10005 - RNA, 20 nt, synthetic construct
  misc_feature 1..20: note = spacer sequence
  source 1..20: mol_type = other RNA
cttctaaagaagtcttgtat

SEQ ID NO: 10006 - RNA, 20 nt, synthetic construct
  misc_feature 1..20: note = spacer sequence
  source 1..20: mol_type = other RNA
actatgcttatcccttctaa

SEQ ID NO: 10007 - RNA, 20 nt, synthetic construct
  misc_feature 1..20: note = spacer sequence
  source 1..20: mol_type = other RNA
tttccactatgcttatccct

SEQ ID NO: 10008 - RNA, 20 nt, synthetic construct
  misc_feature 1..20: note = spacer sequence
  source 1..20: mol_type = other RNA
gcagtagatatgagcttggc

SEQ ID NO: 10009 - RNA, 20 nt, synthetic construct
  misc_feature 1..20: note = spacer sequence
  source 1..20: mol_type = other RNA
actgctgacaagtagcattc

SEQ ID NO: 10010 - RNA, 20 nt, synthetic construct
  misc_feature 1..20: note = spacer sequence
  source 1..20: mol_type = other RNA
tatctactgctgacaagtag

SEQ ID NO: 10011 - RNA, 20 nt, synthetic construct
  misc_feature 1..20: note = spacer sequence
  source 1..20: mol_type = other RNA
ttgctttgtcactagcagaa

SEQ ID NO: 10012 - RNA, 20 nt, synthetic construct
  misc_feature 1..20: note = spacer sequence
  source 1..20: mol_type = other RNA
ctagcagaatgactatgaaa

SEQ ID NO: 10013 - RNA, 20 nt, synthetic construct
  misc_feature 1..20: note = spacer sequence
  source 1..20: mol_type = other RNA
gctagtgacaaagcaaagag

SEQ ID NO: 10014 - RNA, 20 nt, synthetic construct
  misc_feature 1..20: note = spacer sequence
  source 1..20: mol_type = other RNA
ttctgctagtgacaaagcaa

SEQ ID NO: 10015 - RNA, 20 nt, synthetic construct
  misc_feature 1..20: note = spacer sequence
  source 1..20: mol_type = other RNA
tagtcattctgctagtgaca

SEQ ID NO: 10016 - RNA, 20 nt, synthetic construct
  misc_feature 1..20: note = spacer sequence
  source 1..20: mol_type = other RNA
aaatatgaccactgccctgc

SEQ ID NO: 10017 - RNA, 20 nt, synthetic construct
  misc_feature 1..20: note = spacer sequence
  source 1..20: mol_type = other RNA
tatttagacgttttcatagt

SEQ ID NO: 10018 - RNA, 20 nt, synthetic construct
  misc_feature 1..20: note = spacer sequence
  source 1..20: mol_type = other RNA
tgcagcagggcagtggtcat

SEQ ID NO: 10019 - RNA, 20 nt, synthetic construct
  misc_feature 1..20: note = spacer sequence
  source 1..20: mol_type = other RNA
atatgtcatgcagcagggca

SEQ ID NO: 10020 - RNA, 20 nt, synthetic construct
  misc_feature 1..20: note = spacer sequence
  source 1..20: mol_type = other RNA
ggcttctatatgtcatgcag

SEQ ID NO: 10021 - RNA, 20 nt, synthetic construct
  misc_feature 1..20: note = spacer sequence
  source 1..20: mol_type = other RNA
caggcttctatatgtcatgc

SEQ ID NO: 10022 - RNA, 20 nt, synthetic construct
  misc_feature 1..20: note = spacer sequence
  source 1..20: mol_type = other RNA
tctaaaaattatgaagaatg

SEQ ID NO: 10023 - RNA, 20 nt, synthetic construct
  misc_feature 1..20: note = spacer sequence
  source 1..20: mol_type = other RNA
aaaaattatgaagaatgatt

SEQ ID NO: 10024 - RNA, 20 nt, synthetic construct
  misc_feature 1..20: note = spacer sequence
  source 1..20: mol_type = other RNA
taatttttagaggattttgt

SEQ ID NO: 10025 - RNA, 20 nt, synthetic construct
  misc_feature 1..20: note = spacer sequence
  source 1..20: mol_type = other RNA
tcataatttttagaggattt

SEQ ID NO: 10026 - RNA, 20 nt, synthetic construct
  misc_feature 1..20: note = spacer sequence
  source 1..20: mol_type = other RNA
ttcttcataatttttagagg

SEQ ID NO: 10027 - RNA, 20 nt, synthetic construct
  misc_feature 1..20: note = spacer sequence
  source 1..20: mol_type = other RNA
tcctgatccctcataccagt

SEQ ID NO: 10028 - RNA, 20 nt, synthetic construct
  misc_feature 1..20: note = spacer sequence
  source 1..20: mol_type = other RNA
tgatccctcataccagtaaa

SEQ ID NO: 10029 - RNA, 20 nt, synthetic construct
  misc_feature 1..20: note = spacer sequence
  source 1..20: mol_type = other RNA
ggatgaatcattcttcataa

SEQ ID NO: 10030 - RNA, 20 nt, synthetic construct
  misc_feature 1..20: note = spacer sequence
  source 1..20: mol_type = other RNA
ctcataccagtaaagagttt

SEQ ID NO: 10031 - RNA, 20 nt, synthetic construct
  misc_feature 1..20: note = spacer sequence
  source 1..20: mol_type = other RNA
taccagtaaagagtttcaag

SEQ ID NO: 10032 - RNA, 20 nt, synthetic construct
  misc_feature 1..20: note = spacer sequence
  source 1..20: mol_type = other RNA
ttactggtatgagggatcag

SEQ ID NO: 10033 - RNA, 20 nt, synthetic construct
  misc_feature 1..20: note = spacer sequence
  source 1..20: mol_type = other RNA
agtgaagataaagaagaacg

SEQ ID NO: 10034 - RNA, 20 nt, synthetic construct
  misc_feature 1..20: note = spacer sequence
  source 1..20: mol_type = other RNA
cttgaaactctttactggta

SEQ ID NO: 10035 - RNA, 20 nt, synthetic construct
  misc_feature 1..20: note = spacer sequence
  source 1..20: mol_type = other RNA
tcacttgaaactctttactg

SEQ ID NO: 10036 - RNA, 20 nt, synthetic construct
  misc_feature 1..20: note = spacer sequence
  source 1..20: mol_type = other RNA
ttatcttcacttgaaactct

SEQ ID NO: 10037 - RNA, 20 nt, synthetic construct
  misc_feature 1..20: note = spacer sequence
  source 1..20: mol_type = other RNA
tctttatcttcacttgaaac

SEQ ID NO: 10038 - RNA, 20 nt, synthetic construct
  misc_feature 1..20: note = spacer sequence
  source 1..20: mol_type = other RNA
ttcttctttatcttcacttg

SEQ ID NO: 10039 - RNA, 20 nt, synthetic construct
  misc_feature 1..20: note = spacer sequence
  source 1..20: mol_type = other RNA
ggcctgtgatacctgcagaa

SEQ ID NO: 10040 - RNA, 20 nt, synthetic construct
  misc_feature 1..20: note = spacer sequence
  source 1..20: mol_type = other RNA
caggccagataccctcgttc

SEQ ID NO: 10041 - RNA, 20 nt, synthetic construct
  misc_feature 1..20: note = spacer sequence
  source 1..20: mol_type = other RNA
gcaggtatcacaggccagat

SEQ ID NO: 10042 - RNA, 20 nt, synthetic construct
  misc_feature 1..20: note = spacer sequence
  source 1..20: mol_type = other RNA
caatgtttagggattagtca

SEQ ID NO: 10043 - RNA, 20 nt, synthetic construct
  misc_feature 1..20: note = spacer sequence
  source 1..20: mol_type = other RNA
ctaaacattgtgaattctgc

SEQ ID NO: 10044 - RNA, 20 nt, synthetic construct
  misc_feature 1..20: note = spacer sequence
  source 1..20: mol_type = other RNA
aagtaacatgggtactctgc

SEQ ID NO: 10045 - RNA, 20 nt, synthetic construct
  misc_feature 1..20: note = spacer sequence
  source 1..20: mol_type = other RNA
gctatttaccagtggcataa

SEQ ID NO: 10046 - RNA, 20 nt, synthetic construct
  misc_feature 1..20: note = spacer sequence
  source 1..20: mol_type = other RNA
acctttctaaactccaagga

SEQ ID NO: 10047 - RNA, 20 nt, synthetic construct
  misc_feature 1..20: note = spacer sequence
  source 1..20: mol_type = other RNA
aaactccaaggatttttaaa

SEQ ID NO: 10048 - RNA, 20 nt, synthetic construct
  misc_feature 1..20: note = spacer sequence
  source 1..20: mol_type = other RNA
aaggatttttaaaatctgaa

SEQ ID NO: 10049 - RNA, 20 nt, synthetic construct
  misc_feature 1..20: note = spacer sequence
  source 1..20: mol_type = other RNA
ttggagtttagaaaggttga

SEQ ID NO: 10050 - RNA, 20 nt, synthetic construct
  misc_feature 1..20: note = spacer sequence
  source 1..20: mol_type = other RNA
gaaaaacaggaattaatggg

SEQ ID NO: 10051 - RNA, 20 nt, synthetic construct
  misc_feature 1..20: note = spacer sequence
  source 1..20: mol_type = other RNA
gattttaaaaatccttggag

SEQ ID NO: 10052 - RNA, 20 nt, synthetic construct
  misc_feature 1..20: note = spacer sequence
  source 1..20: mol_type = other RNA
tgtttttcagattttaaaaa

SEQ ID NO: 10053 - RNA, 20 nt, synthetic construct
  misc_feature 1..20: note = spacer sequence
  source 1..20: mol_type = other RNA
cctcaccacattgttaggat

SEQ ID NO: 10054 - RNA, 20 nt, synthetic construct
  misc_feature 1..20: note = spacer sequence
  source 1..20: mol_type = other RNA
ccacattgttaggattaaat

SEQ ID NO: 10055 - RNA, 20 nt, synthetic construct
  misc_feature 1..20: note = spacer sequence
  source 1..20: mol_type = other RNA
taacaatgtggtgaggtgag

SEQ ID NO: 10056 - RNA, 20 nt, synthetic construct
  misc_feature 1..20: note = spacer sequence
  source 1..20: mol_type = other RNA
tatttaatcctaacaatgtg

SEQ ID NO: 10057 - RNA, 20 nt, synthetic construct
  misc_feature 1..20: note = spacer sequence
  source 1..20: mol_type = other RNA
cttagcccagtacctaacac

SEQ ID NO: 10058 - RNA, 20 nt, synthetic construct
  misc_feature 1..20: note = spacer sequence
  source 1..20: mol_type = other RNA
tagcccagtacctaacacat

SEQ ID NO: 10059 - RNA, 20 nt, synthetic construct
  misc_feature 1..20: note = spacer sequence
  source 1..20: mol_type = other RNA
gcacttatgtgttaggtact

SEQ ID NO: 10060 - RNA, 20 nt, synthetic construct
  misc_feature 1..20: note = spacer sequence
  source 1..20: mol_type = other RNA
atttactcagcacttatgtg

SEQ ID NO: 10061 - RNA, 20 nt, synthetic construct
  misc_feature 1..20: note = spacer sequence
  source 1..20: mol_type = other RNA
cattgttttgctccatttac

SEQ ID NO: 10062 - RNA, 20 nt, synthetic construct
  misc_feature 1..20: note = spacer sequence
  source 1..20: mol_type = other RNA
tcacattgttttgctccatt

SEQ ID NO: 10063 - RNA, 20 nt, synthetic construct
  misc_feature 1..20: note = spacer sequence
  source 1..20: mol_type = other RNA
tctctgttctttaactatta

SEQ ID NO: 10064 - RNA, 20 nt, synthetic construct
  misc_feature 1..20: note = spacer sequence
  source 1..20: mol_type = other RNA
ctgttctttaactattagcc

SEQ ID NO: 10065 - RNA, 20 nt, synthetic construct
  misc_feature 1..20: note = spacer sequence
  source 1..20: mol_type = other RNA
gttctttaactattagccaa

SEQ ID NO: 10066 - RNA, 20 nt, synthetic construct
  misc_feature 1..20: note = spacer sequence
  source 1..20: mol_type = other RNA
ttaactattagccaaatgat

SEQ ID NO: 10067 - RNA, 20 nt, synthetic construct
  misc_feature 1..20: note = spacer sequence
  source 1..20: mol_type = other RNA
tttggctaatagttaaagaa

SEQ ID NO: 10068 - RNA, 20 nt, synthetic construct
  misc_feature 1..20: note = spacer sequence
  source 1..20: mol_type = other RNA
agatgatcctggttaattcc

SEQ ID NO: 10069 - RNA, 20 nt, synthetic construct
  misc_feature 1..20: note = spacer sequence
  source 1..20: mol_type = other RNA
ggaaaccttatcatttggct

SEQ ID NO: 10070 - RNA, 20 nt, synthetic construct
  misc_feature 1..20: note = spacer sequence
  source 1..20: mol_type = other RNA
tctggaaaccttatcatttg

SEQ ID NO: 10071 - RNA, 20 nt, synthetic construct
  misc_feature 1..20: note = spacer sequence
  source 1..20: mol_type = other RNA
tggttaattccctttaagta

SEQ ID NO: 10072 - RNA, 20 nt, synthetic construct
  misc_feature 1..20: note = spacer sequence
  source 1..20: mol_type = other RNA
ctttaagtatggtatcctca

SEQ ID NO: 10073 - RNA, 20 nt, synthetic construct
  misc_feature 1..20: note = spacer sequence
  source 1..20: mol_type = other RNA
tcaaatggacagggtccgga

SEQ ID NO: 10074 - RNA, 20 nt, synthetic construct
  misc_feature 1..20: note = spacer sequence
  source 1..20: mol_type = other RNA
aatggacagggtccggacgt

SEQ ID NO: 10075 - RNA, 20 nt, synthetic construct
  misc_feature 1..20: note = spacer sequence
  source 1..20: mol_type = other RNA
atttgaggataccatactta

SEQ ID NO: 10076 - RNA, 20 nt, synthetic construct
  misc_feature 1..20: note = spacer sequence
  source 1..20: mol_type = other RNA
ggacgtagtcctgcactgtg

SEQ ID NO: 10077 - RNA, 20 nt, synthetic construct
  misc_feature 1..20: note = spacer sequence
  source 1..20: mol_type = other RNA
ggaccctgtccatttgagga

SEQ ID NO: 10078 - RNA, 20 nt, synthetic construct
  misc_feature 1..20: note = spacer sequence
  source 1..20: mol_type = other RNA
tgcactgtgaattggctttt

SEQ ID NO: 10079 - RNA, 20 nt, synthetic construct
  misc_feature 1..20: note = spacer sequence
  source 1..20: mol_type = other RNA
cagtgcaggactacgtccgg

SEQ ID NO: 10080 - RNA, 20 nt, synthetic construct
  misc_feature 1..20: note = spacer sequence
  source 1..20: mol_type = other RNA
tatttctgtagtaagaaatt

SEQ ID NO: 10081 - RNA, 20 nt, synthetic construct
  misc_feature 1..20: note = spacer sequence
  source 1..20: mol_type = other RNA
gtagtaagaaattaccacaa

SEQ ID NO: 10082 - RNA, 20 nt, synthetic construct
  misc_feature 1..20: note = spacer sequence
  source 1..20: mol_type = other RNA
tactacagaaataggaaact

SEQ ID NO: 10083 - RNA, 20 nt, synthetic construct
  misc_feature 1..20: note = spacer sequence
  source 1..20: mol_type = other RNA
aaagtgtaatttgtgttgct

SEQ ID NO: 10084 - RNA, 20 nt, synthetic construct
  misc_feature 1..20: note = spacer sequence
  source 1..20: mol_type = other RNA
gaatctcactagcatcagca

SEQ ID NO: 10085 - RNA, 20 nt, synthetic construct
  misc_feature 1..20: note = spacer sequence
  source 1..20: mol_type = other RNA
gacctcaaaagtgtaatttg

SEQ ID NO: 10086 - RNA, 20 nt, synthetic construct
  misc_feature 1..20: note = spacer sequence
  source 1..20: mol_type = other RNA
cactagcatcagcaaggcga

SEQ ID NO: 10087 - RNA, 20 nt, synthetic construct
  misc_feature 1..20: note = spacer sequence
  source 1..20: mol_type = other RNA
ctagcatcagcaaggcgaca

SEQ ID NO: 10088 - RNA, 20 nt, synthetic construct
  misc_feature 1..20: note = spacer sequence
  source 1..20: mol_type = other RNA
gcaaggcgacattccttgta

SEQ ID NO: 10089 - RNA, 20 nt, synthetic construct
  misc_feature 1..20: note = spacer sequence
  source 1..20: mol_type = other RNA
ccttgctgatgctagtgaga

SEQ ID NO: 10090 - RNA, 20 nt, synthetic construct
  misc_feature 1..20: note = spacer sequence
  source 1..20: mol_type = other RNA
ttgtaaaggctctagggaag

SEQ ID NO: 10091 - RNA, 20 nt, synthetic construct
  misc_feature 1..20: note = spacer sequence
  source 1..20: mol_type = other RNA
agggaagaatctatttcttg

SEQ ID NO: 10092 - RNA, 20 nt, synthetic construct
  misc_feature 1..20: note = spacer sequence
  source 1..20: mol_type = other RNA
ctagagcctttacaaggaat

SEQ ID NO: 10093 - RNA, 20 nt, synthetic construct
  misc_feature 1..20: note = spacer sequence
  source 1..20: mol_type = other RNA
tccctagagcctttacaagg

SEQ ID NO: 10094 - RNA, 20 nt, synthetic construct
  misc_feature 1..20: note = spacer sequence
  source 1..20: mol_type = other RNA
atttcttgtctaatcttgct

SEQ ID NO: 10095 - RNA, 20 nt, synthetic construct
  misc_feature 1..20: note = spacer sequence
  source 1..20: mol_type = other RNA
tgtctaatcttgcttctaca

SEQ ID NO: 10096 - RNA, 20 nt, synthetic construct
  misc_feature 1..20: note = spacer sequence
  source 1..20: mol_type = other RNA
aatcttgcttctacagggtg

SEQ ID NO: 10097 - RNA, 20 nt, synthetic construct
  misc_feature 1..20: note = spacer sequence
  source 1..20: mol_type = other RNA
tgcttctacagggtgcctac

SEQ ID NO: 10098 - RNA, 20 nt, synthetic construct
  misc_feature 1..20: note = spacer sequence
  source 1..20: mol_type = other RNA
acagggtgcctacattcttt

SEQ ID NO: 10099 - RNA, 20 nt, synthetic construct
  misc_feature 1..20: note = spacer sequence
  source 1..20: mol_type = other RNA
tttggctcatggcctcttct

SEQ ID NO: 10100 - RNA, 20 nt, synthetic construct
  misc_feature 1..20: note = spacer sequence
  source 1..20: mol_type = other RNA
tggcctcttcttccatcttc

SEQ ID NO: 10101 - RNA, 20 nt, synthetic construct
  misc_feature 1..20: note = spacer sequence
  source 1..20: mol_type = other RNA
tcttccatcttcaaagccag

SEQ ID NO: 10102 - RNA, 20 nt, synthetic construct
  misc_feature 1..20: note = spacer sequence
  source 1..20: mol_type = other RNA
tccatcttcaaagccagcag

SEQ ID NO: 10103 - RNA, 20 nt, synthetic construct
  misc_feature 1..20: note = spacer sequence
  source 1..20: mol_type = other RNA
atcttcaaagccagcagtat

SEQ ID NO: 10104 - RNA, 20 nt, synthetic construct
  misc_feature 1..20: note = spacer sequence
  source 1..20: mol_type = other RNA
tcaaagccagcagtatagca

SEQ ID NO: 10105 - RNA, 20 nt, synthetic construct
  misc_feature 1..20: note = spacer sequence
  source 1..20: mol_type = other RNA
aagccagcagtatagcatct

SEQ ID NO: 10106 - RNA, 20 nt, synthetic construct
  misc_feature 1..20: note = spacer sequence
  source 1..20: mol_type = other RNA
tctccttctatctcttctgt

SEQ ID NO: 10107 - RNA, 20 nt, synthetic construct
  misc_feature 1..20: note = spacer sequence
  source 1..20: mol_type = other RNA
ccttctatctcttctgttgt

SEQ ID NO: 10108 - RNA, 20 nt, synthetic construct
  misc_feature 1..20: note = spacer sequence
  source 1..20: mol_type = other RNA
ttctatctcttctgttgttt

SEQ ID NO: 10109 - RNA, 20 nt, synthetic construct
  misc_feature 1..20: note = spacer sequence
  source 1..20: mol_type = other RNA
atctcttctgttgttttatt

SEQ ID NO: 10110 - RNA, 20 nt, synthetic construct
  misc_feature 1..20: note = spacer sequence
  source 1..20: mol_type = other RNA
cttctgttgttttatttcct

SEQ ID NO: 10111 - RNA, 20 nt, synthetic construct
  misc_feature 1..20: note = spacer sequence
  source 1..20: mol_type = other RNA
tctgttgttttatttccttc

SEQ ID NO: 10112 - RNA, 20 nt, synthetic construct
  misc_feature 1..20: note = spacer sequence
  source 1..20: mol_type = other RNA
gttgttttatttccttcttt

SEQ ID NO: 10113 - RNA, 20 nt, synthetic construct
  misc_feature 1..20: note = spacer sequence
  source 1..20: mol_type = other RNA
ttctttgactcctacctctc

SEQ ID NO: 10114 - RNA, 20 nt, synthetic construct
  misc_feature 1..20: note = spacer sequence
  source 1..20: mol_type = other RNA
ttgactcctacctctctagt

SEQ ID NO: 10115 - RNA, 20 nt, synthetic construct
  misc_feature 1..20: note = spacer sequence
  source 1..20: mol_type = other RNA
aagaaggaaataaaacaaca

SEQ ID NO: 10116 - RNA, 20 nt, synthetic construct
  misc_feature 1..20: note = spacer sequence
  source 1..20: mol_type = other RNA
tacctctctagtataaggac

SEQ ID NO: 10117 - RNA, 20 nt, synthetic construct
  misc_feature 1..20: note = spacer sequence
  source 1..20: mol_type = other RNA
ctagtataaggacccttatg

SEQ ID NO: 10118 - RNA, 20 nt, synthetic construct
  misc_feature 1..20: note = spacer sequence
  source 1..20: mol_type = other RNA
agtataaggacccttatgat

SEQ ID NO: 10119 - RNA, 20 nt, synthetic construct
  misc_feature 1..20: note = spacer sequence
  source 1..20: mol_type = other RNA
ttatactagagaggtaggag

SEQ ID NO: 10120 - RNA, 20 nt, synthetic construct
  misc_feature 1..20: note = spacer sequence
  source 1..20: mol_type = other RNA
taagggtccttatactagag

SEQ ID NO: 10121 - RNA, 20 nt, synthetic construct
  misc_feature 1..20: note = spacer sequence
  source 1..20: mol_type = other RNA
gggtgggcccggtgtaatca

SEQ ID NO: 10122 - RNA, 20 nt, synthetic construct
  misc_feature 1..20: note = spacer sequence
  source 1..20: mol_type = other RNA
aggataattaacccgtctca

SEQ ID NO: 10123 - RNA, 20 nt, synthetic construct
  misc_feature 1..20: note = spacer sequence
  source 1..20: mol_type = other RNA
tggattatctgggtgggccc

SEQ ID NO: 10124 - RNA, 20 nt, synthetic construct
  misc_feature 1..20: note = spacer sequence
  source 1..20: mol_type = other RNA
caacattcttaaccttattc

SEQ ID NO: 10125 - RNA, 20 nt, synthetic construct
  misc_feature 1..20: note = spacer sequence
  source 1..20: mol_type = other RNA
acattcttaaccttattcac

SEQ ID NO: 10126 - RNA, 20 nt, synthetic construct
  misc_feature 1..20: note = spacer sequence
  source 1..20: mol_type = other RNA
taaccttattcacatcccca

SEQ ID NO: 10127 - RNA, 20 nt, synthetic construct
  misc_feature 1..20: note = spacer sequence
  source 1..20: mol_type = other RNA
catccccagtctcttttgcc

SEQ ID NO: 10128 - RNA, 20 nt, synthetic construct
  misc_feature 1..20: note = spacer sequence
  source 1..20: mol_type = other RNA
ccagtctcttttgccttgca

SEQ ID NO: 10129 - RNA, 20 nt, synthetic construct
  misc_feature 1..20: note = spacer sequence
  source 1..20: mol_type = other RNA
cttttgccttgcaaggtaat

SEQ ID NO: 10130 - RNA, 20 nt, synthetic construct
  misc_feature 1..20: note = spacer sequence
  source 1..20: mol_type = other RNA
tttgccttgcaaggtaatat

SEQ ID NO: 10131 - RNA, 20 nt, synthetic construct
  misc_feature 1..20: note = spacer sequence
  source 1..20: mol_type = other RNA
aaaacctgtaaatatattac

SEQ ID NO: 10132 - RNA, 20 nt, synthetic construct
  misc_feature 1..20: note = spacer sequence
  source 1..20: mol_type = other RNA
aattctaaaacctgtaaata

SEQ ID NO: 10133 - RNA, 20 nt, synthetic construct
  misc_feature 1..20: note = spacer sequence
  source 1..20: mol_type = other RNA
taatctaattctaaaacctg

SEQ ID NO: 10134 - RNA, 20 nt, synthetic construct
  misc_feature 1..20: note = spacer sequence
  source 1..20: mol_type = other RNA
ttggagaagggggcattatt

SEQ ID NO: 10135 - RNA, 20 nt, synthetic construct
  misc_feature 1..20: note = spacer sequence
  source 1..20: mol_type = other RNA
aaagatgttcataatctaat

SEQ ID NO: 10136 - RNA, 20 nt, synthetic construct
  misc_feature 1..20: note = spacer sequence
  source 1..20: mol_type = other RNA
ccaaagatgttcataatcta

SEQ ID NO: 10137 - RNA, 20 nt, synthetic construct
  misc_feature 1..20: note = spacer sequence
  source 1..20: mol_type = other RNA
ttaactccaatttgtaatca

SEQ ID NO: 10138 - RNA, 20 nt, synthetic construct
  misc_feature 1..20: note = spacer sequence
  source 1..20: mol_type = other RNA
aatttgtaatcatctgaaat

SEQ ID NO: 10139 - RNA, 20 nt, synthetic construct
  misc_feature 1..20: note = spacer sequence
  source 1..20: mol_type = other RNA
tctgaaatcttcaggctgct

SEQ ID NO: 10140 - RNA, 20 nt, synthetic construct
  misc_feature 1..20: note = spacer sequence
  source 1..20: mol_type = other RNA
gaaatcttcaggctgctttc

SEQ ID NO: 10141 - RNA, 20 nt, synthetic construct
  misc_feature 1..20: note = spacer sequence
  source 1..20: mol_type = other RNA
gatgattacaaattggagtt

SEQ ID NO: 10142 - RNA, 20 nt, synthetic construct
  misc_feature 1..20: note = spacer sequence
  source 1..20: mol_type = other RNA
tcaggctgctttcaccagaa

SEQ ID NO: 10143 - RNA, 20 nt, synthetic construct
  misc_feature 1..20: note = spacer sequence
  source 1..20: mol_type = other RNA
ggctgctttcaccagaattc

SEQ ID NO: 10144 - RNA, 20 nt, synthetic construct
  misc_feature 1..20: note = spacer sequence
  source 1..20: mol_type = other RNA
ccagaattcccatcaaaact

SEQ ID NO: 10145 - RNA, 20 nt, synthetic construct
  misc_feature 1..20: note = spacer sequence
  source 1..20: mol_type = other RNA
ggtgaaagcagcctgaagat

SEQ ID NO: 10146 - RNA, 20 nt, synthetic construct
  misc_feature 1..20: note = spacer sequence
  source 1..20: mol_type = other RNA
catcaaaactagatcttcac

SEQ ID NO: 10147 - RNA, 20 nt, synthetic construct
  misc_feature 1..20: note = spacer sequence
  source 1..20: mol_type = other RNA
aaactagatcttcacattga

SEQ ID NO: 10148 - RNA, 20 nt, synthetic construct
  misc_feature 1..20: note = spacer sequence
  source 1..20: mol_type = other RNA
agttttgatgggaattctgg

SEQ ID NO: 10149 - RNA, 20 nt, synthetic construct
  misc_feature 1..20: note = spacer sequence
  source 1..20: mol_type = other RNA
tcacattgactttgtgttgg

SEQ ID NO: 10150 - RNA, 20 nt, synthetic construct
  misc_feature 1..20: note = spacer sequence
  source 1..20: mol_type = other RNA
cattgactttgtgttggttt

SEQ ID NO: 10151 - RNA, 20 nt, synthetic construct
  misc_feature 1..20: note = spacer sequence
  source 1..20: mol_type = other RNA
atgtgaagatctagttttga

SEQ ID NO: 10152 - RNA, 20 nt, synthetic construct
  misc_feature 1..20: note = spacer sequence
  source 1..20: mol_type = other RNA
aacagacctttcaacctatt

SEQ ID NO: 10153 - RNA, 20 nt, synthetic construct
  misc_feature 1..20: note = spacer sequence
  source 1..20: mol_type = other RNA
gttagaaaccaacacaaagt

SEQ ID NO: 10154 - RNA, 20 nt, synthetic construct
  misc_feature 1..20: note = spacer sequence
  source 1..20: mol_type = other RNA
acctatttagcaagtctaga

SEQ ID NO: 10155 - RNA, 20 nt, synthetic construct
  misc_feature 1..20: note = spacer sequence
  source 1..20: mol_type = other RNA
agaagtgattttctgctatt

SEQ ID NO: 10156 - RNA, 20 nt, synthetic construct
  misc_feature 1..20: note = spacer sequence
  source 1..20: mol_type = other RNA
agacttgctaaataggttga

SEQ ID NO: 10157 - RNA, 20 nt, synthetic construct
  misc_feature 1..20: note = spacer sequence
  source 1..20: mol_type = other RNA
cttctagacttgctaaatag

SEQ ID NO: 10158 - RNA, 20 nt, synthetic construct
  misc_feature 1..20: note = spacer sequence
  source 1..20: mol_type = other RNA
gctatttgatgtagctccag

SEQ ID NO: 10159 - RNA, 20 nt, synthetic construct
  misc_feature 1..20: note = spacer sequence
  source 1..20: mol_type = other RNA
aatagcagaaaatcacttct

SEQ ID NO: 10160 - RNA, 20 nt, synthetic construct
  misc_feature 1..20: note = spacer sequence
  source 1..20: mol_type = other RNA
agctattccaatcagcttgt

SEQ ID NO: 10161 - RNA, 20 nt, synthetic construct
  misc_feature 1..20: note = spacer sequence
  source 1..20: mol_type = other RNA
aatcagcttgtaaatttcat

SEQ ID NO: 10162 - RNA, 20 nt, synthetic construct
  misc_feature 1..20: note = spacer sequence
  source 1..20: mol_type = other RNA
gcttgtaaatttcatgaact

SEQ ID NO: 10163 - RNA, 20 nt, synthetic construct
  misc_feature 1..20: note = spacer sequence
  source 1..20: mol_type = other RNA
tgaactcatttggtatgctt

SEQ ID NO: 10164 - RNA, 20 nt, synthetic construct
  misc_feature 1..20: note = spacer sequence
  source 1..20: mol_type = other RNA
tgaaatttacaagctgattg

SEQ ID NO: 10165 - RNA, 20 nt, synthetic construct
  misc_feature 1..20: note = spacer sequence
  source 1..20: mol_type = other RNA
tttggtatgctttcctccaa

SEQ ID NO: 10166 - RNA, 20 nt, synthetic construct
  misc_feature 1..20: note = spacer sequence
  source 1..20: mol_type = other RNA
tccaagtcaatgttttctaa

SEQ ID NO: 10167 - RNA, 20 nt, synthetic construct
  misc_feature 1..20: note = spacer sequence
  source 1..20: mol_type = other RNA
aagtcaatgttttctaaaaa

SEQ ID NO: 10168 - RNA, 20 nt, synthetic construct
  misc_feature 1..20: note = spacer sequence
  source 1..20: mol_type = other RNA
atgttttctaaaaattaaaa

SEQ ID NO: 10169 - RNA, 20 nt, synthetic construct
  misc_feature 1..20: note = spacer sequence
  source 1..20: mol_type = other RNA
aaaaattaaaataggaccta

SEQ ID NO: 10170 - RNA, 20 nt, synthetic construct
  misc_feature 1..20: note = spacer sequence
  source 1..20: mol_type = other RNA
acttagcaatactgtcatcc

SEQ ID NO: 10171 - RNA, 20 nt, synthetic construct
  misc_feature 1..20: note = spacer sequence
  source 1..20: mol_type = other RNA
tcctgcccatatttttctaa

SEQ ID NO: 10172 - RNA, 20 nt, synthetic construct
  misc_feature 1..20: note = spacer sequence
  source 1..20: mol_type = other RNA
tgcccatatttttctaattc

SEQ ID NO: 10173 - RNA, 20 nt, synthetic construct
  misc_feature 1..20: note = spacer sequence
  source 1..20: mol_type = other RNA
aattcattcataatgcaatc

SEQ ID NO: 10174 - RNA, 20 nt, synthetic construct
  misc_feature 1..20: note = spacer sequence
  source 1..20: mol_type = other RNA
ttcataatgcaatcatatac

SEQ ID NO: 10175 - RNA, 20 nt, synthetic construct
  misc_feature 1..20: note = spacer sequence
  source 1..20: mol_type = other RNA
taatgcaatcatatacaata

SEQ ID NO: 10176 - RNA, 20 nt, synthetic construct
  misc_feature 1..20: note = spacer sequence
  source 1..20: mol_type = other RNA
tatacaatacctttctgaaa

SEQ ID NO: 10177 - RNA, 20 nt, synthetic construct
  misc_feature 1..20: note = spacer sequence
  source 1..20: mol_type = other RNA
gaaatatttggtatatagtt

SEQ ID NO: 10178 - RNA, 20 nt, synthetic construct
  misc_feature 1..20: note = spacer sequence
  source 1..20: mol_type = other RNA
gaaaggtattgtatatgatt

SEQ ID NO: 10179 - RNA, 20 nt, synthetic construct
  misc_feature 1..20: note = spacer sequence
  source 1..20: mol_type = other RNA
ctagacataacatactttac

SEQ ID NO: 10180 - RNA, 20 nt, synthetic construct
  misc_feature 1..20: note = spacer sequence
  source 1..20: mol_type = other RNA
agtgaaaactatataccaaa

SEQ ID NO: 10181 - RNA, 20 nt, synthetic construct
  misc_feature 1..20: note = spacer sequence
  source 1..20: mol_type = other RNA
gttataaattgttagtgaat

SEQ ID NO: 10182 - RNA, 20 nt, synthetic construct
  misc_feature 1..20: note = spacer sequence
  source 1..20: mol_type = other RNA
ctaacaatttataacagact

SEQ ID NO: 10183 - RNA, 20 nt, synthetic construct
  misc_feature 1..20: note = spacer sequence
  source 1..20: mol_type = other RNA
gttctggctcttagtgacta

SEQ ID NO: 10184 - RNA, 20 nt, synthetic construct
  misc_feature 1..20: note = spacer sequence
  source 1..20: mol_type = other RNA
ggctcttagtgactagcaat

SEQ ID NO: 10185 - RNA, 20 nt, synthetic construct
  misc_feature 1..20: note = spacer sequence
  source 1..20: mol_type = other RNA
tagtgactagcaatttctaa

SEQ ID NO: 10186 - RNA, 20 nt, synthetic construct
  misc_feature 1..20: note = spacer sequence
  source 1..20: mol_type = other RNA
ctaagagccagaacagattc

SEQ ID NO: 10187 - RNA, 20 nt, synthetic construct
  misc_feature 1..20: note = spacer sequence
  source 1..20: mol_type = other RNA
aaaattaataaaaactggca

SEQ ID NO: 10188 - RNA, 20 nt, synthetic construct
  misc_feature 1..20: note = spacer sequence
  source 1..20: mol_type = other RNA
acaatttctaaagtatgctt

SEQ ID NO: 10189 - RNA, 20 nt, synthetic construct
  misc_feature 1..20: note = spacer sequence
  source 1..20: mol_type = other RNA
aaagtatgctttttcctact

SEQ ID NO: 10190 - RNA, 20 nt, synthetic construct
  misc_feature 1..20: note = spacer sequence
  source 1..20: mol_type = other RNA
tactttttgaaataaagttg

SEQ ID NO: 10191 - RNA, 20 nt, synthetic construct
  misc_feature 1..20: note = spacer sequence
  source 1..20: mol_type = other RNA
aaaagtaggaaaaagcatac

SEQ ID NO: 10192 - RNA, 20 nt, synthetic construct
  misc_feature 1..20: note = spacer sequence
  source 1..20: mol_type = other RNA
gcaactttatttcaaaaagt

SEQ ID NO: 10193 - RNA, 20 nt, synthetic construct
  misc_feature 1..20: note = spacer sequence
  source 1..20: mol_type = other RNA
tattgcctcggcaactttat

SEQ ID NO: 10194 - RNA, 20 nt, synthetic construct
  misc_feature 1..20: note = spacer sequence
  source 1..20: mol_type = other RNA
aattcttattgcctcggcaa

SEQ ID NO: 10195 - RNA, 20 nt, synthetic construct
  misc_feature 1..20: note = spacer sequence
  source 1..20: mol_type = other RNA
tctaattcttattgcctcgg

SEQ ID NO: 10196 - RNA, 20 nt, synthetic construct
  misc_feature 1..20: note = spacer sequence
  source 1..20: mol_type = other RNA
tattactatgtgaagttgaa

SEQ ID NO: 10197 - RNA, 20 nt, synthetic construct
  misc_feature 1..20: note = spacer sequence
  source 1..20: mol_type = other RNA
catagtaataggagcttaag

SEQ ID NO: 10198 - RNA, 20 nt, synthetic construct
  misc_feature 1..20: note = spacer sequence
  source 1..20: mol_type = other RNA
acttcacatagtaataggag

SEQ ID NO: 10199 - RNA, 20 nt, synthetic construct
  misc_feature 1..20: note = spacer sequence
  source 1..20: mol_type = other RNA
ttaaattcaacttcacatag

SEQ ID NO: 10200 - RNA, 20 nt, synthetic construct
  misc_feature 1..20: note = spacer sequence
  source 1..20: mol_type = other RNA
attttttctttaaattcaac

SEQ ID NO: 10201 - RNA, 20 nt, synthetic construct
  misc_feature 1..20: note = spacer sequence
  source 1..20: mol_type = other RNA
taaaagaaatacatatatac

SEQ ID NO: 10202 - RNA, 20 nt, synthetic construct
  misc_feature 1..20: note = spacer sequence
  source 1..20: mol_type = other RNA
tttaggaaacatttctattt

SEQ ID NO: 10203 - RNA, 20 nt, synthetic construct
  misc_feature 1..20: note = spacer sequence
  source 1..20: mol_type = other RNA
ttgatatattaagttgagta

SEQ ID NO: 10204 - RNA, 20 nt, synthetic construct
  misc_feature 1..20: note = spacer sequence
  source 1..20: mol_type = other RNA
taaaccaaatagttaaatcc

SEQ ID NO: 10205 - RNA, 20 nt, synthetic construct
  misc_feature 1..20: note = spacer sequence
  source 1..20: mol_type = other RNA
aacacaacttttatgtttat

SEQ ID NO: 10206 - RNA, 20 nt, synthetic construct
  misc_feature 1..20: note = spacer sequence
  source 1..20: mol_type = other RNA
atgtgttgctaataaacata

SEQ ID NO: 10207 - RNA, 20 nt, synthetic construct
  misc_feature 1..20: note = spacer sequence
  source 1..20: mol_type = other RNA
taacaaaagataattttaaa

SEQ ID NO: 10208 - RNA, 20 nt, synthetic construct
  misc_feature 1..20: note = spacer sequence
  source 1..20: mol_type = other RNA
tttgttaagaaatttagcgt

SEQ ID NO: 10209 - RNA, 20 nt, synthetic construct
  misc_feature 1..20: note = spacer sequence
  source 1..20: mol_type = other RNA
tctttcctgtaaagatgctt

SEQ ID NO: 10210 - RNA, 20 nt, synthetic construct
  misc_feature 1..20: note = spacer sequence
  source 1..20: mol_type = other RNA
ttcctgtaaagatgctttat

SEQ ID NO: 10211 - RNA, 20 nt, synthetic construct
  misc_feature 1..20: note = spacer sequence
  source 1..20: mol_type = other RNA
tgtaaagatgctttatccat

SEQ ID NO: 10212 - RNA, 20 nt, synthetic construct
  misc_feature 1..20: note = spacer sequence
  source 1..20: mol_type = other RNA
ttacaggaaagatgatttta

SEQ ID NO: 10213 - RNA, 20 nt, synthetic construct
  misc_feature 1..20: note = spacer sequence
  source 1..20: mol_type = other RNA
atctaatttaaacctgaaga

SEQ ID NO: 10214 - RNA, 20 nt, synthetic construct
  misc_feature 1..20: note = spacer sequence
  source 1..20: mol_type = other RNA
aatttaaacctgaagacaac

SEQ ID NO: 10215 - RNA, 20 nt, synthetic construct
  misc_feature 1..20: note = spacer sequence
  source 1..20: mol_type = other RNA
ggtttaaattagatggataa

SEQ ID NO: 10216 - RNA, 20 nt, synthetic construct
  misc_feature 1..20: note = spacer sequence
  source 1..20: mol_type = other RNA
tcaggtttaaattagatgga

SEQ ID NO: 10217 - RNA, 20 nt, synthetic construct
  misc_feature 1..20: note = spacer sequence
  source 1..20: mol_type = other RNA
ataaaacactactgctagaa

SEQ ID NO: 10218 - RNA, 20 nt, synthetic construct
  misc_feature 1..20: note = spacer sequence
  source 1..20: mol_type = other RNA
ccagcccagtactctttttg

SEQ ID NO: 10219 - RNA, 20 nt, synthetic construct
  misc_feature 1..20: note = spacer sequence
  source 1..20: mol_type = other RNA
caccagcccagtactctttt

SEQ ID NO: 10220 - RNA, 20 nt, synthetic construct
  misc_feature 1..20: note = spacer sequence
  source 1..20: mol_type = other RNA
aatggacgagttttaattcc

SEQ ID NO: 10221 - RNA, 20 nt, synthetic construct
  misc_feature 1..20: note = spacer sequence
  source 1..20: mol_type = other RNA
attagatctcaccagcccag

SEQ ID NO: 10222 - RNA, 20 nt, synthetic construct
  misc_feature 1..20: note = spacer sequence
  source 1..20: mol_type = other RNA
tccattagatctcaccagcc

SEQ ID NO: 10223 - RNA, 20 nt, synthetic construct
  misc_feature 1..20: note = spacer sequence
  source 1..20: mol_type = other RNA
gaagagaaatttaaaactat

SEQ ID NO: 10224 - RNA, 20 nt, synthetic construct
  misc_feature 1..20: note = spacer sequence
  source 1..20: mol_type = other RNA
gaattaaaactcgtccatta

SEQ ID NO: 10225 - RNA, 20 nt, synthetic construct
  misc_feature 1..20: note = spacer sequence
  source 1..20: mol_type = other RNA
tcggaattaaaactcgtcca

SEQ ID NO: 10226 - RNA, 20 nt, synthetic construct
  misc_feature 1..20: note = spacer sequence
  source 1..20: mol_type = other RNA
cttcggaattaaaactcgtc

SEQ ID NO: 10227 - RNA, 20 nt, synthetic construct
  misc_feature 1..20: note = spacer sequence
  source 1..20: mol_type = other RNA
tgttttatagttttaaattt

SEQ ID NO: 10228 - RNA, 20 nt, synthetic construct
  misc_feature 1..20: note = spacer sequence
  source 1..20: mol_type = other RNA
ataccttttgaaccagtaat

SEQ ID NO: 10229 - RNA, 20 nt, synthetic construct
  misc_feature 1..20: note = spacer sequence
  source 1..20: mol_type = other RNA
aataattgccttagataaat

SEQ ID NO: 10230 - RNA, 20 nt, synthetic construct
  misc_feature 1..20: note = spacer sequence
  source 1..20: mol_type = other RNA
caaattttccacaataatta

SEQ ID NO: 10231 - RNA, 20 nt, synthetic construct
  misc_feature 1..20: note = spacer sequence
  source 1..20: mol_type = other RNA
aattttccacaataattatt

SEQ ID NO: 10232 - RNA, 20 nt, synthetic construct
  misc_feature 1..20: note = spacer sequence
  source 1..20: mol_type = other RNA
acaataattattgagaaaat

SEQ ID NO: 10233 - RNA, 20 nt, synthetic construct
  misc_feature 1..20: note = spacer sequence
  source 1..20: mol_type = other RNA
ataattattgtggaaaattt

SEQ ID NO: 10234 - RNA, 20 nt, synthetic construct
  misc_feature 1..20: note = spacer sequence
  source 1..20: mol_type = other RNA
caataattattgtggaaaat

SEQ ID NO: 10235 - RNA, 20 nt, synthetic construct
  misc_feature 1..20: note = spacer sequence
  source 1..20: mol_type = other RNA
ttttctcaataattattgtg

SEQ ID NO: 10236 - RNA, 20 nt, synthetic construct
  misc_feature 1..20: note = spacer sequence
  source 1..20: mol_type = other RNA
gtcattttctcaataattat

SEQ ID NO: 10237 - RNA, 20 nt, synthetic construct
  misc_feature 1..20: note = spacer sequence
  source 1..20: mol_type = other RNA
ctgtcattttctcaataatt

SEQ ID NO: 10238 - RNA, 20 nt, synthetic construct
  misc_feature 1..20: note = spacer sequence
  source 1..20: mol_type = other RNA
tgctattaaaaagatctggt

SEQ ID NO: 10239 - RNA, 20 nt, synthetic construct
  misc_feature 1..20: note = spacer sequence
  source 1..20: mol_type = other RNA
ttttaatagcatgaaattct

SEQ ID NO: 10240 - RNA, 20 nt, synthetic construct
  misc_feature 1..20: note = spacer sequence
  source 1..20: mol_type = other RNA
ggtaactacataaaaaattc

SEQ ID NO: 10241 - RNA, 20 nt, synthetic construct
  misc_feature 1..20: note = spacer sequence
  source 1..20: mol_type = other RNA
acttgtgtttggaatttttt

SEQ ID NO: 10242 - RNA, 20 nt, synthetic construct
  misc_feature 1..20: note = spacer sequence
  source 1..20: mol_type = other RNA
tccacttgtgtttggaattt

SEQ ID NO: 10243 - RNA, 20 nt, synthetic construct
  misc_feature 1..20: note = spacer sequence
  source 1..20: mol_type = other RNA
cctccacttgtgtttggaat

SEQ ID NO: 10244 - RNA, 20 nt, synthetic construct
  misc_feature 1..20: note = spacer sequence
  source 1..20: mol_type = other RNA
ttttttctcctccacttgtg

SEQ ID NO: 10245 - RNA, 20 nt, synthetic construct
  misc_feature 1..20: note = spacer sequence
  source 1..20: mol_type = other RNA
tttgtctttttttctcctcc

SEQ ID NO: 10246 - RNA, 20 nt, synthetic construct
  misc_feature 1..20: note = spacer sequence
  source 1..20: mol_type = other RNA
aaaatgctaatggtgtttga

SEQ ID NO: 10247 - RNA, 20 nt, synthetic construct
  misc_feature 1..20: note = spacer sequence
  source 1..20: mol_type = other RNA
aacaccattagcattttaga

SEQ ID NO: 10248 - RNA, 20 nt, synthetic construct
  misc_feature 1..20: note = spacer sequence
  source 1..20: mol_type = other RNA
catcaaacaccattagcatt

SEQ ID NO: 10249 - RNA, 20 nt, synthetic construct
  misc_feature 1..20: note = spacer sequence
  source 1..20: mol_type = other RNA
actaattcaaatttatctaa

SEQ ID NO: 10250 - RNA, 20 nt, synthetic construct
  misc_feature 1..20: note = spacer sequence
  source 1..20: mol_type = other RNA
aatttatctaacttgcatta

SEQ ID NO: 10251 - RNA, 20 nt, synthetic construct
  misc_feature 1..20: note = spacer sequence
  source 1..20: mol_type = other RNA
aacttgcattaatttttaaa

SEQ ID NO: 10252 - RNA, 20 nt, synthetic construct
  misc_feature 1..20: note = spacer sequence
  source 1..20: mol_type = other RNA
tttaaaaattaatgcaagtt

SEQ ID NO: 10253 - RNA, 20 nt, synthetic construct
  misc_feature 1..20: note = spacer sequence
  source 1..20: mol_type = other RNA
gtctgagatacatctttgtt

SEQ ID NO: 10254 - RNA, 20 nt, synthetic construct
  misc_feature 1..20: note = spacer sequence
  source 1..20: mol_type = other RNA
gagatacatctttgttcaac

SEQ ID NO: 10255 - RNA, 20 nt, synthetic construct
  misc_feature 1..20: note = spacer sequence
  source 1..20: mol_type = other RNA
gacagatacaaattaaagtt

SEQ ID NO: 10256 - RNA, 20 nt, synthetic construct
  misc_feature 1..20: note = spacer sequence
  source 1..20: mol_type = other RNA
cagacagatacaaattaaag

SEQ ID NO: 10257 - RNA, 20 nt, synthetic construct
  misc_feature 1..20: note = spacer sequence
  source 1..20: mol_type = other RNA
ttgttcaacttttgattata

SEQ ID NO: 10258 - RNA, 20 nt, synthetic construct
  misc_feature 1..20: note = spacer sequence
  source 1..20: mol_type = other RNA
acttttgattataaatataa

SEQ ID NO: 10259 - RNA, 20 nt, synthetic construct
  misc_feature 1..20: note = spacer sequence
  source 1..20: mol_type = other RNA
aaagttgaacaaagatgtat

SEQ ID NO: 10260 - RNA, 20 nt, synthetic construct
  misc_feature 1..20: note = spacer sequence
  source 1..20: mol_type = other RNA
cttagttatatttataatca

SEQ ID NO: 10261 - RNA, 20 nt, synthetic construct
  misc_feature 1..20: note = spacer sequence
  source 1..20: mol_type = other RNA
ttatcacttagttatattta

SEQ ID NO: 10262 - RNA, 20 nt, synthetic construct
  misc_feature 1..20: note = spacer sequence
  source 1..20: mol_type = other RNA
gtataaccatatttctttat

SEQ ID NO: 10263 - RNA, 20 nt, synthetic construct
  misc_feature 1..20: note = spacer sequence
  source 1..20: mol_type = other RNA
ccattatcacataacttgtc

SEQ ID NO: 10264 - RNA, 20 nt, synthetic construct
  misc_feature 1..20: note = spacer sequence
  source 1..20: mol_type = other RNA
cataacttgtccacagagta

SEQ ID NO: 10265 - RNA, 20 nt, synthetic construct
  misc_feature 1..20: note = spacer sequence
  source 1..20: mol_type = other RNA
ggagttcaagaccagcctga

SEQ ID NO: 10266 - RNA, 20 nt, synthetic construct
  misc_feature 1..20: note = spacer sequence
  source 1..20: mol_type = other RNA
gttgctctgcccaccttggc

SEQ ID NO: 10267 - RNA, 20 nt, synthetic construct
  misc_feature 1..20: note = spacer sequence
  source 1..20: mol_type = other RNA
gcccaccttggcctcccaaa

SEQ ID NO: 10268 - RNA, 20 nt, synthetic construct
  misc_feature 1..20: note = spacer sequence
  source 1..20: mol_type = other RNA
caaagtgctgggattacagg

SEQ ID NO: 10269 - RNA, 20 nt, synthetic construct
  misc_feature 1..20: note = spacer sequence
  source 1..20: mol_type = other RNA
cagcactttgggaggccaag

SEQ ID NO: 10270 - RNA, 20 nt, synthetic construct
  misc_feature 1..20: note = spacer sequence
  source 1..20: mol_type = other RNA
cgcctgtaatcccagcactt

SEQ ID NO: 10271 - RNA, 20 nt, synthetic construct
  misc_feature 1..20: note = spacer sequence
  source 1..20: mol_type = other RNA
acatctcttcattaaagaaa

SEQ ID NO: 10272 - RNA, 20 nt, synthetic construct
  misc_feature 1..20: note = spacer sequence
  source 1..20: mol_type = other RNA
cttcattaaagaaagtgtcc

SEQ ID NO: 10273 - RNA, 20 nt, synthetic construct
  misc_feature 1..20: note = spacer sequence
  source 1..20: mol_type = other RNA
tcattaaagaaagtgtccct

SEQ ID NO: 10274 - RNA, 20 nt, synthetic construct
  misc_feature 1..20: note = spacer sequence
  source 1..20: mol_type = other RNA
ttaaagaaagtgtcccttta

SEQ ID NO: 10275 - RNA, 20 nt, synthetic construct
  misc_feature 1..20: note = spacer sequence
  source 1..20: mol_type = other RNA
ttaatgaagagatgttgaaa

SEQ ID NO: 10276 - RNA, 20 nt, synthetic construct
  misc_feature 1..20: note = spacer sequence
  source 1..20: mol_type = other RNA
ctttaattattgatatacag

SEQ ID NO: 10277 - RNA, 20 nt, synthetic construct
  misc_feature 1..20: note = spacer sequence
  source 1..20: mol_type = other RNA
ataattaaagggacactttc

SEQ ID NO: 10278 - RNA, 20 nt, synthetic construct
  misc_feature 1..20: note = spacer sequence
  source 1..20: mol_type = other RNA
atataaattccacttgcttg

SEQ ID NO: 10279 - RNA, 20 nt, synthetic construct
  misc_feature 1..20: note = spacer sequence
  source 1..20: mol_type = other RNA
acttgcttgtcacagactca

SEQ ID NO: 10280 - RNA, 20 nt, synthetic construct
  misc_feature 1..20: note = spacer sequence
  source 1..20: mol_type = other RNA
cagactcaaaccttttgaaa

SEQ ID NO: 10281 - RNA, 20 nt, synthetic construct
  misc_feature 1..20: note = spacer sequence
  source 1..20: mol_type = other RNA
gtgacaagcaagtggaattt

SEQ ID NO: 10282 - RNA, 20 nt, synthetic construct
  misc_feature 1..20: note = spacer sequence
  source 1..20: mol_type = other RNA
aaccttttgaaacctaaaca

SEQ ID NO: 10283 - RNA, 20 nt, synthetic construct
  misc_feature 1..20: note = spacer sequence
  source 1..20: mol_type = other RNA
aaaggtttgagtctgtgaca

SEQ ID NO: 10284 - RNA, 20 nt, synthetic construct
  misc_feature 1..20: note = spacer sequence
  source 1..20: mol_type = other RNA
acttgcttagaggaaggtat

SEQ ID NO: 10285 - RNA, 20 nt, synthetic construct
  misc_feature 1..20: note = spacer sequence
  source 1..20: mol_type = other RNA
aagcaagtggaaaagtggtt

SEQ ID NO: 10286 - RNA, 20 nt, synthetic construct
  misc_feature 1..20: note = spacer sequence
  source 1..20: mol_type = other RNA
tctaagcaagtggaaaagtg

SEQ ID NO: 10287 - RNA, 20 nt, synthetic construct
  misc_feature 1..20: note = spacer sequence
  source 1..20: mol_type = other RNA
taccttcctctaagcaagtg

SEQ ID NO: 10288 - RNA, 20 nt, synthetic construct
  misc_feature 1..20: note = spacer sequence
  source 1..20: mol_type = other RNA
tgttttcataccttcctcta

SEQ ID NO: 10289 - RNA, 20 nt, synthetic construct
  misc_feature 1..20: note = spacer sequence
  source 1..20: mol_type = other RNA
ggcattgtcaatatgaaata

SEQ ID NO: 10290 - RNA, 20 nt, synthetic construct
  misc_feature 1..20: note = spacer sequence
  source 1..20: mol_type = other RNA
gttgtgttttttttgttttt

SEQ ID NO: 10291 - RNA, 20 nt, synthetic construct
  misc_feature 1..20: note = spacer sequence
  source 1..20: mol_type = other RNA
tctgcattatttttcactct

SEQ ID NO: 10292 - RNA, 20 nt, synthetic construct
  misc_feature 1..20: note = spacer sequence
  source 1..20: mol_type = other RNA
gcattatttttcactcttta

SEQ ID NO: 10293 - RNA, 20 nt, synthetic construct
  misc_feature 1..20: note = spacer sequence
  source 1..20: mol_type = other RNA
ctctttaattgtaccatcga

SEQ ID NO: 10294 - RNA, 20 nt, synthetic construct
  misc_feature 1..20: note = spacer sequence
  source 1..20: mol_type = other RNA
ttaattgtaccatcgagccc

SEQ ID NO: 10295 - RNA, 20 nt, synthetic construct
  misc_feature 1..20: note = spacer sequence
  source 1..20: mol_type = other RNA
gggcagaactaattttctaa

SEQ ID NO: 10296 - RNA, 20 nt, synthetic construct
  misc_feature 1..20: note = spacer sequence
  source 1..20: mol_type = other RNA
gcccggagtaaatggtaata

SEQ ID NO: 10297 - RNA, 20 nt, synthetic construct
  misc_feature 1..20: note = spacer sequence
  source 1..20: mol_type = other RNA
aagtattaatagttaatttc

SEQ ID NO: 10298 - RNA, 20 nt, synthetic construct
  misc_feature 1..20: note = spacer sequence
  source 1..20: mol_type = other RNA
gaaaacttactctataaagc

SEQ ID NO: 10299 - RNA, 20 nt, synthetic construct
  misc_feature 1..20: note = spacer sequence
  source 1..20: mol_type = other RNA
gaaattaactattaatactt

SEQ ID NO: 10300 - RNA, 20 nt, synthetic construct
  misc_feature 1..20: note = spacer sequence
  source 1..20: mol_type = other RNA
ataaagcatgtcctaatgta

SEQ ID NO: 10301 - RNA, 20 nt, synthetic construct
  misc_feature 1..20: note = spacer sequence
  source 1..20: mol_type = other RNA
taatgtattattattcttct

SEQ ID NO: 10302 - RNA, 20 nt, synthetic construct
  misc_feature 1..20: note = spacer sequence
  source 1..20: mol_type = other RNA
tcattttacactacctcccc

SEQ ID NO: 10303 - RNA, 20 nt, synthetic construct
  misc_feature 1..20: note = spacer sequence
  source 1..20: mol_type = other RNA
ttttacactacctcccctac

SEQ ID NO: 10304 - RNA, 20 nt, synthetic construct
  misc_feature 1..20: note = spacer sequence
  source 1..20: mol_type = other RNA
cctacaatttccaagggtct

SEQ ID NO: 10305 - RNA, 20 nt, synthetic construct
  misc_feature 1..20: note = spacer sequence
  source 1..20: mol_type = other RNA
aagggtctagccttcactca

SEQ ID NO: 10306 - RNA, 20 nt, synthetic construct
  misc_feature 1..20: note = spacer sequence
  source 1..20: mol_type = other RNA
agccttcactcaaactttcc

SEQ ID NO: 10307 - RNA, 20 nt, synthetic construct
  misc_feature 1..20: note = spacer sequence
  source 1..20: mol_type = other RNA
ctcaaactttccacttttag

SEQ ID NO: 10308 - RNA, 20 nt, synthetic construct
  misc_feature 1..20: note = spacer sequence
  source 1..20: mol_type = other RNA
aactttccacttttagaatc

SEQ ID NO: 10309 - RNA, 20 nt, synthetic construct
  misc_feature 1..20: note = spacer sequence
  source 1..20: mol_type = other RNA
acttttagaatcaaggctgt

SEQ ID NO: 10310 - RNA, 20 nt, synthetic construct
  misc_feature 1..20: note = spacer sequence
  source 1..20: mol_type = other RNA
caaatcaatccacaacttct

SEQ ID NO: 10311 - RNA, 20 nt, synthetic construct
  misc_feature 1..20: note = spacer sequence
  source 1..20: mol_type = other RNA
atccacaacttcttcctttt

SEQ ID NO: 10312 - RNA, 20 nt, synthetic construct
  misc_feature 1..20: note = spacer sequence
  source 1..20: mol_type = other RNA
acaacttcttccttttcact

SEQ ID NO: 10313 - RNA, 20 nt, synthetic construct
  misc_feature 1..20: note = spacer sequence
  source 1..20: mol_type = other RNA
tccttttcacttgcttgaaa

SEQ ID NO: 10314 - RNA, 20 nt, synthetic construct
  misc_feature 1..20: note = spacer sequence
  source 1..20: mol_type = other RNA
ttttcacttgcttgaaagac

SEQ ID NO: 10315 - RNA, 20 nt, synthetic construct
  misc_feature 1..20: note = spacer sequence
  source 1..20: mol_type = other RNA
cttgcttgaaagacaggcca

SEQ ID NO: 10316 - RNA, 20 nt, synthetic construct
  misc_feature 1..20: note = spacer sequence
  source 1..20: mol_type = other RNA
agcaagtgaaaaggaagaag

SEQ ID NO: 10317 - RNA, 20 nt, synthetic construct
  misc_feature 1..20: note = spacer sequence
  source 1..20: mol_type = other RNA
ttcaagcaagtgaaaaggaa

SEQ ID NO: 10318 - RNA, 20 nt, synthetic construct
  misc_feature 1..20: note = spacer sequence
  source 1..20: mol_type = other RNA
tggcctgtctttcaagcaag

SEQ ID NO: 10319 - RNA, 20 nt, synthetic construct
  misc_feature 1..20: note = spacer sequence
  source 1..20: mol_type = other RNA
cctcctggcctgtctttcaa

SEQ ID NO: 10320 - RNA, 20 nt, synthetic construct
  misc_feature 1..20: note = spacer sequence
  source 1..20: mol_type = other RNA
taaaatcacctcctggcctg

SEQ ID NO: 10321 - RNA, 20 nt, synthetic construct
  misc_feature 1..20: note = spacer sequence
  source 1..20: mol_type = other RNA
gcatcacatttactgtgcct

SEQ ID NO: 10322 - RNA, 20 nt, synthetic construct
  misc_feature 1..20: note = spacer sequence
  source 1..20: mol_type = other RNA
catttactgtgcctcactaa

SEQ ID NO: 10323 - RNA, 20 nt, synthetic construct
  misc_feature 1..20: note = spacer sequence
  source 1..20: mol_type = other RNA
ctaatgaacttctggtctcc

SEQ ID NO: 10324 - RNA, 20 nt, synthetic construct
  misc_feature 1..20: note = spacer sequence
  source 1..20: mol_type = other RNA
ttagtgaggcacagtaaatg

SEQ ID NO: 10325 - RNA, 20 nt, synthetic construct
  misc_feature 1..20: note = spacer sequence
  source 1..20: mol_type = other RNA
ggtctccctcccctcacagt

SEQ ID NO: 10326 - RNA, 20 nt, synthetic construct
  misc_feature 1..20: note = spacer sequence
  source 1..20: mol_type = other RNA
ccctcccctcacagttggct

SEQ ID NO: 10327 - RNA, 20 nt, synthetic construct
  misc_feature 1..20: note = spacer sequence
  source 1..20: mol_type = other RNA
ctcccctcacagttggctat

SEQ ID NO: 10328 - RNA, 20 nt, synthetic construct
  misc_feature 1..20: note = spacer sequence
  source 1..20: mol_type = other RNA
cctcacagttggctattaaa

SEQ ID NO: 10329 - RNA, 20 nt, synthetic construct
  misc_feature 1..20: note = spacer sequence
  source 1..20: mol_type = other RNA
cagttggctattaaaacatt

SEQ ID NO: 10330 - RNA, 20 nt, synthetic construct
  misc_feature 1..20: note = spacer sequence
  source 1..20: mol_type = other RNA
ttagccagcacctggttatt

SEQ ID NO: 10331 - RNA, 20 nt, synthetic construct
  misc_feature 1..20: note = spacer sequence
  source 1..20: mol_type = other RNA
tgcatttgcccattaaataa

SEQ ID NO: 10332 - RNA, 20 nt, synthetic construct
  misc_feature 1..20: note = spacer sequence
  source 1..20: mol_type = other RNA
tttcttgtccttcccttaaa

SEQ ID NO: 10333 - RNA, 20 nt, synthetic construct
  misc_feature 1..20: note = spacer sequence
  source 1..20: mol_type = other RNA
tgtccttcccttaaactgtt

SEQ ID NO: 10334 - RNA, 20 nt, synthetic construct
  misc_feature 1..20: note = spacer sequence
  source 1..20: mol_type = other RNA
ttcccttaaactgttcccac

SEQ ID NO: 10335 - RNA, 20 nt, synthetic construct
  misc_feature 1..20: note = spacer sequence
  source 1..20: mol_type = other RNA
cttaaactgttcccactgga

SEQ ID NO: 10336 - RNA, 20 nt, synthetic construct
  misc_feature 1..20: note = spacer sequence
  source 1..20: mol_type = other RNA
cactggattactccttaaaa

SEQ ID NO: 10337 - RNA, 20 nt, synthetic construct
  misc_feature 1..20: note = spacer sequence
  source 1..20: mol_type = other RNA
agtgggaacagtttaaggga

SEQ ID NO: 10338 - RNA, 20 nt, synthetic construct
  misc_feature 1..20: note = spacer sequence
  source 1..20: mol_type = other RNA
ttaaaatagtacgtcaaaac

SEQ ID NO: 10339 - RNA, 20 nt, synthetic construct
  misc_feature 1..20: note = spacer sequence
  source 1..20: mol_type = other RNA
aaactaaacctatcctttga

SEQ ID NO: 10340 - RNA, 20 nt, synthetic construct
  misc_feature 1..20: note = spacer sequence
  source 1..20: mol_type = other RNA
tttgaacaaacttaggattc

SEQ ID NO: 10341 - RNA, 20 nt, synthetic construct
  misc_feature 1..20: note = spacer sequence
  source 1..20: mol_type = other RNA
aaggataggtttagttttga

SEQ ID NO: 10342 - RNA, 20 nt, synthetic construct
  misc_feature 1..20: note = spacer sequence
  source 1..20: mol_type = other RNA
taagtttgttcaaaggatag

SEQ ID NO: 10343 - RNA, 20 nt, synthetic construct
  misc_feature 1..20: note = spacer sequence
  source 1..20: mol_type = other RNA
ggatcaacaaaataatttac

SEQ ID NO: 10344 - RNA, 20 nt, synthetic construct
  misc_feature 1..20: note = spacer sequence
  source 1..20: mol_type = other RNA
cgaatcctaagtttgttcaa

SEQ ID NO: 10345 - RNA, 20 nt, synthetic construct
  misc_feature 1..20: note = spacer sequence
  source 1..20: mol_type = other RNA
acaaaataatttacagagcc

SEQ ID NO: 10346 - RNA, 20 nt, synthetic construct
  misc_feature 1..20: note = spacer sequence
  source 1..20: mol_type = other RNA
gtaaattattttgttgatcc

SEQ ID NO: 10347 - RNA, 20 nt, synthetic construct
  misc_feature 1..20: note = spacer sequence
  source 1..20: mol_type = other RNA
gcatggctctgtaaattatt

SEQ ID NO: 10348 - RNA, 20 nt, synthetic construct
  misc_feature 1..20: note = spacer sequence
  source 1..20: mol_type = other RNA
agcggcctctgcatggctct

SEQ ID NO: 10349 - RNA, 20 nt, synthetic construct
  misc_feature 1..20: note = spacer sequence
  source 1..20: mol_type = other RNA
tcttgacagaaaatcagata

SEQ ID NO: 10350 - RNA, 20 nt, synthetic construct
  misc_feature 1..20: note = spacer sequence
  source 1..20: mol_type = other RNA
tgtatggccattaaagttta

SEQ ID NO: 10351 - RNA, 20 nt, synthetic construct
  misc_feature 1..20: note = spacer sequence
  source 1..20: mol_type = other RNA
ttaaactttaatggccatac

SEQ ID NO: 10352 - RNA, 20 nt, synthetic construct
  misc_feature 1..20: note = spacer sequence
  source 1..20: mol_type = other RNA
taaaggctttaaaacggata

SEQ ID NO: 10353 - RNA, 20 nt, synthetic construct
  misc_feature 1..20: note = spacer sequence
  source 1..20: mol_type = other RNA
gttttaaagcctttaagaaa

SEQ ID NO: 10354 - RNA, 20 nt, synthetic construct
  misc_feature 1..20: note = spacer sequence
  source 1..20: mol_type = other RNA
tttaagcagggtattataat

SEQ ID NO: 10355 - RNA, 20 nt, synthetic construct
  misc_feature 1..20: note = spacer sequence
  source 1..20: mol_type = other RNA
actttaactgaaagtcaaaa

SEQ ID NO: 10356 - RNA, 20 nt, synthetic construct
  misc_feature 1..20: note = spacer sequence
  source 1..20: mol_type = other RNA
gttaaagtagaattataata

SEQ ID NO: 10357 - RNA, 20 nt, synthetic construct
  misc_feature 1..20: note = spacer sequence
  source 1..20: mol_type = other RNA
aaaggaggaaatatagagga

SEQ ID NO: 10358 - RNA, 20 nt, synthetic construct
  misc_feature 1..20: note = spacer sequence
  source 1..20: mol_type = other RNA
ttttgactttcagttaaagt

SEQ ID NO: 10359 - RNA, 20 nt, synthetic construct
  misc_feature 1..20: note = spacer sequence
  source 1..20: mol_type = other RNA
tccttttgactttcagttaa

SEQ ID NO: 10360 - RNA, 20 nt, synthetic construct
  misc_feature 1..20: note = spacer sequence
  source 1..20: mol_type = other RNA
atatttcctccttttgactt

SEQ ID NO: 10361 - RNA, 20 nt, synthetic construct
  misc_feature 1..20: note = spacer sequence
  source 1..20: mol_type = other RNA
tctatatttcctccttttga

SEQ ID NO: 10362 - RNA, 20 nt, synthetic construct
  misc_feature 1..20: note = spacer sequence
  source 1..20: mol_type = other RNA
tgacagaatgcattaagata

SEQ ID NO: 10363 - RNA, 20 nt, synthetic construct
  misc_feature 1..20: note = spacer sequence
  source 1..20: mol_type = other RNA
tgagtgttcctctatatttc

SEQ ID NO: 10364 - RNA, 20 nt, synthetic construct
  misc_feature 1..20: note = spacer sequence
  source 1..20: mol_type = other RNA
gtcatgagtgttcctctata

SEQ ID NO: 10365 - RNA, 20 nt, synthetic construct
  misc_feature 1..20: note = spacer sequence
  source 1..20: mol_type = other RNA
aagtcttgctgttttattta

SEQ ID NO: 10366 - RNA, 20 nt, synthetic construct
  misc_feature 1..20: note = spacer sequence
  source 1..20: mol_type = other RNA
tttattaacatcaagcaaga

SEQ ID NO: 10367 - RNA, 20 nt, synthetic construct
  misc_feature 1..20: note = spacer sequence
  source 1..20: mol_type = other RNA
agcaagagcaattctttttt

SEQ ID NO: 10368 - RNA, 20 nt, synthetic construct
  misc_feature 1..20: note = spacer sequence
  source 1..20: mol_type = other RNA
tgcttgatgttaataaaaga

SEQ ID NO: 10369 - RNA, 20 nt, synthetic construct
  misc_feature 1..20: note = spacer sequence
  source 1..20: mol_type = other RNA
ttttttttttttttttttga

SEQ ID NO: 10370 - RNA, 20 nt, synthetic construct
  misc_feature 1..20: note = spacer sequence
  source 1..20: mol_type = other RNA
aaaaaaaaaaaaaaaaaaga

SEQ ID NO: 10371 - RNA, 20 nt, synthetic construct
  misc_feature 1..20: note = spacer sequence
  source 1..20: mol_type = other RNA
caaaaaaaaaaaaaaaaaaa

SEQ ID NO: 10372 - RNA, 20 nt, synthetic construct
  misc_feature 1..20: note = spacer sequence
  source 1..20: mol_type = other RNA
atctcaaaaaaaaaaaaaaa

SEQ ID NO: 10373 - RNA, 20 nt, synthetic construct
  misc_feature 1..20: note = spacer sequence
  source 1..20: mol_type = other RNA
cgctctgttgcccgggctgg

SEQ ID NO: 10374 - RNA, 20 nt, synthetic construct
  misc_feature 1..20: note = spacer sequence
  source 1..20: mol_type = other RNA
ctctgttgcccgggctggag

SEQ ID NO: 10375 - RNA, 20 nt, synthetic construct
  misc_feature 1..20: note = spacer sequence
  source 1..20: mol_type = other RNA
ttaagttttaaggggttgct

SEQ ID NO: 10376 - RNA, 20 nt, synthetic construct
  misc_feature 1..20: note = spacer sequence
  source 1..20: mol_type = other RNA
gcagtaaccacagcaacccc

SEQ ID NO: 10377 - RNA, 20 nt, synthetic construct
  misc_feature 1..20: note = spacer sequence
  source 1..20: mol_type = other RNA
aatctgcacatttttattac

SEQ ID NO: 10378 - RNA, 20 nt, synthetic construct
  misc_feature 1..20: note = spacer sequence
  source 1..20: mol_type = other RNA
gcacatttttattacatacc

SEQ ID NO: 10379 - RNA, 20 nt, synthetic construct
  misc_feature 1..20: note = spacer sequence
  source 1..20: mol_type = other RNA
atcttaattggaagtttatt

SEQ ID NO: 10380 - RNA, 20 nt, synthetic construct
  misc_feature 1..20: note = spacer sequence
  source 1..20: mol_type = other RNA
taattggaagtttattagga

SEQ ID NO: 10381 - RNA, 20 nt, synthetic construct
  misc_feature 1..20: note = spacer sequence
  source 1..20: mol_type = other RNA
aattaagatggattgcttat

SEQ ID NO: 10382 - RNA, 20 nt, synthetic construct
  misc_feature 1..20: note = spacer sequence
  source 1..20: mol_type = other RNA
ggttgtttgtaaatatttat

SEQ ID NO: 10383 - RNA, 20 nt, synthetic construct
  misc_feature 1..20: note = spacer sequence
  source 1..20: mol_type = other RNA
gcctcaaacaaatatagaga

SEQ ID NO: 10384 - RNA, 20 nt, synthetic construct
  misc_feature 1..20: note = spacer sequence
  source 1..20: mol_type = other RNA
aacaaatatagagataaata

SEQ ID NO: 10385 - RNA, 20 nt, synthetic construct
  misc_feature 1..20: note = spacer sequence
  source 1..20: mol_type = other RNA
atatttgtttgaggccgatt

SEQ ID NO: 10386 - RNA, 20 nt, synthetic construct
  misc_feature 1..20: note = spacer sequence
  source 1..20: mol_type = other RNA
ctatatttgtttgaggccga

SEQ ID NO: 10387 - RNA, 20 nt, synthetic construct
  misc_feature 1..20: note = spacer sequence
  source 1..20: mol_type = other RNA
cttttaaagttttatttatc

SEQ ID NO: 10388 - RNA, 20 nt, synthetic construct
  misc_feature 1..20: note = spacer sequence
  source 1..20: mol_type = other RNA
tcacttttaaagttttattt

SEQ ID NO: 10389 - RNA, 20 nt, synthetic construct
  misc_feature 1..20: note = spacer sequence
  source 1..20: mol_type = other RNA
caggtcttcacttttaaagt

SEQ ID NO: 10390 - RNA, 20 nt, synthetic construct
  misc_feature 1..20: note = spacer sequence
  source 1..20: mol_type = other RNA
ataatttttgttcacaggtc

SEQ ID NO: 10391 - RNA, 20 nt, synthetic construct
  misc_feature 1..20: note = spacer sequence
  source 1..20: mol_type = other RNA
ctataatttttgttcacagg

SEQ ID NO: 10392 - RNA, 20 nt, synthetic construct
  misc_feature 1..20: note = spacer sequence
  source 1..20: mol_type = other RNA
ctaagcaacaaagtacaagg

SEQ ID NO: 10393 - RNA, 20 nt, synthetic construct
  misc_feature 1..20: note = spacer sequence
  source 1..20: mol_type = other RNA
ttgtactttgttgcttagtg

SEQ ID NO: 10394 - RNA, 20 nt, synthetic construct
  misc_feature 1..20: note = spacer sequence
  source 1..20: mol_type = other RNA
cctaaaaattcaatgtaaat

SEQ ID NO: 10395 - RNA, 20 nt, synthetic construct
  misc_feature 1..20: note = spacer sequence
  source 1..20: mol_type = other RNA
gtaaaattttgactgaggca

SEQ ID NO: 10396 - RNA, 20 nt, synthetic construct
  misc_feature 1..20: note = spacer sequence
  source 1..20: mol_type = other RNA
aaattttactgaaatggtta

SEQ ID NO: 10397 - RNA, 20 nt, synthetic construct
  misc_feature 1..20: note = spacer sequence
  source 1..20: mol_type = other RNA
gtcaaaattttactgaaatg

SEQ ID NO: 10398 - RNA, 20 nt, synthetic construct
  misc_feature 1..20: note = spacer sequence
  source 1..20: mol_type = other RNA
aagtcattacactcaaggtc

SEQ ID NO: 10399 - RNA, 20 nt, synthetic construct
  misc_feature 1..20: note = spacer sequence
  source 1..20: mol_type = other RNA
ttacactcaaggtcgggtgt

SEQ ID NO: 10400 - RNA, 20 nt, synthetic construct
  misc_feature 1..20: note = spacer sequence
  source 1..20: mol_type = other RNA
aggtcgggtgtggtggctca

SEQ ID NO: 10401 - RNA, 20 nt, synthetic construct
  misc_feature 1..20: note = spacer sequence
  source 1..20: mol_type = other RNA
ggtgtggtggctcacgcctg

SEQ ID NO: 10402 - RNA, 20 nt, synthetic construct
  misc_feature 1..20: note = spacer sequence
  source 1..20: mol_type = other RNA
cgcctgtaatcccagcactt

SEQ ID NO: 10403 - RNA, 20 nt, synthetic construct
  misc_feature 1..20: note = spacer sequence
  source 1..20: mol_type = other RNA
cagcactttgggaggctgag

SEQ ID NO: 10404 - RNA, 20 nt, synthetic construct
  misc_feature 1..20: note = spacer sequence
  source 1..20: mol_type = other RNA
ttattgtgacatatcagtat

SEQ ID NO: 10405 - RNA, 20 nt, synthetic construct
  misc_feature 1..20: note = spacer sequence
  source 1..20: mol_type = other RNA
caataatgaatacaaatgtt

SEQ ID NO: 10406 - RNA, 20 nt, synthetic construct
  misc_feature 1..20: note = spacer sequence
  source 1..20: mol_type = other RNA
gtatgcagataagtttttcc

SEQ ID NO: 10407 - RNA, 20 nt, synthetic construct
  misc_feature 1..20: note = spacer sequence
  source 1..20: mol_type = other RNA
gcatactgatatgtcacaat

SEQ ID NO: 10408 - RNA, 20 nt, synthetic construct
  misc_feature 1..20: note = spacer sequence
  source 1..20: mol_type = other RNA
actatttcaaaaaacatata

SEQ ID NO: 10409 - RNA, 20 nt, synthetic construct
  misc_feature 1..20: note = spacer sequence
  source 1..20: mol_type = other RNA
aaaaacatatattaatgcaa

SEQ ID NO: 10410 - RNA, 20 nt, synthetic construct
  misc_feature 1..20: note = spacer sequence
  source 1..20: mol_type = other RNA
ggccatttccattactcatt

SEQ ID NO: 10411 - RNA, 20 nt, synthetic construct
  misc_feature 1..20: note = spacer sequence
  source 1..20: mol_type = other RNA
attactcatttcatgattat

SEQ ID NO: 10412 - RNA, 20 nt, synthetic construct
  misc_feature 1..20: note = spacer sequence
  source 1..20: mol_type = other RNA
tttcatgattatttctgaaa

SEQ ID NO: 10413 - RNA, 20 nt, synthetic construct
  misc_feature 1..20: note = spacer sequence
  source 1..20: mol_type = other RNA
tgattatttctgaaaataat

SEQ ID NO: 10414 - RNA, 20 nt, synthetic construct
  misc_feature 1..20: note = spacer sequence
  source 1..20: mol_type = other RNA
tgaaatgagtaatggaaatg

SEQ ID NO: 10415 - RNA, 20 nt, synthetic construct
  misc_feature 1..20: note = spacer sequence
  source 1..20: mol_type = other RNA
gaaaataattttgctataca

SEQ ID NO: 10416 - RNA, 20 nt, synthetic construct
  misc_feature 1..20: note = spacer sequence
  source 1..20: mol_type = other RNA
gaaataatcatgaaatgagt

SEQ ID NO: 10417 - RNA, 20 nt, synthetic construct
  misc_feature 1..20: note = spacer sequence
  source 1..20: mol_type = other RNA
gctctggatgtcaaatatgc

SEQ ID NO: 10418 - RNA, 20 nt, synthetic construct
  misc_feature 1..20: note = spacer sequence
  source 1..20: mol_type = other RNA
ggatgtcaaatatgccagct

SEQ ID NO: 10419 - RNA, 20 nt, synthetic construct
  misc_feature 1..20: note = spacer sequence
  source 1..20: mol_type = other RNA
agagcagatttttttaaaac

SEQ ID NO: 10420 - RNA, 20 nt, synthetic construct
  misc_feature 1..20: note = spacer sequence
  source 1..20: mol_type = other RNA
aatatgccagctataccact

SEQ ID NO: 10421 - RNA, 20 nt, synthetic construct
  misc_feature 1..20: note = spacer sequence
  source 1..20: mol_type = other RNA
ccggtctcttccaactggga

SEQ ID NO: 10422 - RNA, 20 nt, synthetic construct
  misc_feature 1..20: note = spacer sequence
  source 1..20: mol_type = other RNA
ggtctcttccaactgggatt

SEQ ID NO: 10423 - RNA, 20 nt, synthetic construct
  misc_feature 1..20: note = spacer sequence
  source 1..20: mol_type = other RNA
cttccaactgggattattga

SEQ ID NO: 10424 - RNA, 20 nt, synthetic construct
  misc_feature 1..20: note = spacer sequence
  source 1..20: mol_type = other RNA
tccaactgggattattgacc

SEQ ID NO: 10425 - RNA, 20 nt, synthetic construct
  misc_feature 1..20: note = spacer sequence
  source 1..20: mol_type = other RNA
cagcagcacagtattaatta

SEQ ID NO: 10426 - RNA, 20 nt, synthetic construct
  misc_feature 1..20: note = spacer sequence
  source 1..20: mol_type = other RNA
gtgttaatattaagtgtaat

SEQ ID NO: 10427 - RNA, 20 nt, synthetic construct
  misc_feature 1..20: note = spacer sequence
  source 1..20: mol_type = other RNA
acatttctgtgttaatatta

SEQ ID NO: 10428 - RNA, 20 nt, synthetic construct
  misc_feature 1..20: note = spacer sequence
  source 1..20: mol_type = other RNA
ctcctaagctctcaacagat

SEQ ID NO: 10429 - RNA, 20 nt, synthetic construct
  misc_feature 1..20: note = spacer sequence
  source 1..20: mol_type = other RNA
cctaagctctcaacagatcc

SEQ ID NO: 10430 - RNA, 20 nt, synthetic construct
  misc_feature 1..20: note = spacer sequence
  source 1..20: mol_type = other RNA
taagctctcaacagatcctg

SEQ ID NO: 10431 - RNA, 20 nt, synthetic construct
  misc_feature 1..20: note = spacer sequence
  source 1..20: mol_type = other RNA
caacagatcctggtaaggcc

SEQ ID NO: 10432 - RNA, 20 nt, synthetic construct
  misc_feature 1..20: note = spacer sequence
  source 1..20: mol_type = other RNA
acagatcctggtaaggcctc

SEQ ID NO: 10433 - RNA, 20 nt, synthetic construct
  misc_feature 1..20: note = spacer sequence
  source 1..20: mol_type = other RNA
gttgagagcttaggagagac

SEQ ID NO: 10434 - RNA, 20 nt, synthetic construct
  misc_feature 1..20: note = spacer sequence
  source 1..20: mol_type = other RNA
tggtaaggcctcttctaacg

SEQ ID NO: 10435 - RNA, 20 nt, synthetic construct
  misc_feature 1..20: note = spacer sequence
  source 1..20: mol_type = other RNA
tgataagctgaaaactacac

SEQ ID NO: 10436 - RNA, 20 nt, synthetic construct
  misc_feature 1..20: note = spacer sequence
  source 1..20: mol_type = other RNA
gaagtgtgctaaaaaaggat

SEQ ID NO: 10437 - RNA, 20 nt, synthetic construct
  misc_feature 1..20: note = spacer sequence
  source 1..20: mol_type = other RNA
gagcaacagcatacaacttt

SEQ ID NO: 10438 - RNA, 20 nt, synthetic construct
  misc_feature 1..20: note = spacer sequence
  source 1..20: mol_type = other RNA
ttttttagcacacttcagag

SEQ ID NO: 10439 - RNA, 20 nt, synthetic construct
  misc_feature 1..20: note = spacer sequence
  source 1..20: mol_type = other RNA
caacaaatgttatgaataac

SEQ ID NO: 10440 - RNA, 20 nt, synthetic construct
  misc_feature 1..20: note = spacer sequence
  source 1..20: mol_type = other RNA
acaaatgttatgaataacac

SEQ ID NO: 10441 - RNA, 20 nt, synthetic construct
  misc_feature 1..20: note = spacer sequence
  source 1..20: mol_type = other RNA
taacatttgttgagacaata

SEQ ID NO: 10442 - RNA, 20 nt, synthetic construct
  misc_feature 1..20: note = spacer sequence
  source 1..20: mol_type = other RNA
ctactatgttatcaaggtgt

SEQ ID NO: 10443 - RNA, 20 nt, synthetic construct
  misc_feature 1..20: note = spacer sequence
  source 1..20: mol_type = other RNA
aggtgtatttcaaatgagat

SEQ ID NO: 10444 - RNA, 20 nt, synthetic construct
  misc_feature 1..20: note = spacer sequence
  source 1..20: mol_type = other RNA
aatgagatttgagtgtgcgc

SEQ ID NO: 10445 - RNA, 20 nt, synthetic construct
  misc_feature 1..20: note = spacer sequence
  source 1..20: mol_type = other RNA
tttgaaatacaccttgataa

SEQ ID NO: 10446 - RNA, 20 nt, synthetic construct
  misc_feature 1..20: note = spacer sequence
  source 1..20: mol_type = other RNA
catttgaaatacaccttgat

SEQ ID NO: 10447 - RNA, 20 nt, synthetic construct
  misc_feature 1..20: note = spacer sequence
  source 1..20: mol_type = other RNA
aatctcatttgaaatacacc

SEQ ID NO: 10448 - RNA, 20 nt, synthetic construct
  misc_feature 1..20: note = spacer sequence
  source 1..20: mol_type = other RNA
gcgcacactcaaatctcatt

SEQ ID NO: 10449 - RNA, 20 nt, synthetic construct
  misc_feature 1..20: note = spacer sequence
  source 1..20: mol_type = other RNA
tgttgtaagtatttccctcc

SEQ ID NO: 10450 - RNA, 20 nt, synthetic construct
  misc_feature 1..20: note = spacer sequence
  source 1..20: mol_type = other RNA
gtgataaaccccgctacaga

SEQ ID NO: 10451 - RNA, 20 nt, synthetic construct
  misc_feature 1..20: note = spacer sequence
  source 1..20: mol_type = other RNA
ctgatgttcttgttgtaagt

SEQ ID NO: 10452 - RNA, 20 nt, synthetic construct
  misc_feature 1..20: note = spacer sequence
  source 1..20: mol_type = other RNA
gtagcggggtttatcactga

SEQ ID NO: 10453 - RNA, 20 nt, synthetic construct
  misc_feature 1..20: note = spacer sequence
  source 1..20: mol_type = other RNA
gaagaatcactttatcgcaa

SEQ ID NO: 10454 - RNA, 20 nt, synthetic construct
  misc_feature 1..20: note = spacer sequence
  source 1..20: mol_type = other RNA
gagctttctgtagcggggtt

SEQ ID NO: 10455 - RNA, 20 nt, synthetic construct
  misc_feature 1..20: note = spacer sequence
  source 1..20: mol_type = other RNA
tcagagctttctgtagcggg

SEQ ID NO: 10456 - RNA, 20 nt, synthetic construct
  misc_feature 1..20: note = spacer sequence
  source 1..20: mol_type = other RNA
ctttatcgcaatcactataa

SEQ ID NO: 10457 - RNA, 20 nt, synthetic construct
  misc_feature 1..20: note = spacer sequence
  source 1..20: mol_type = other RNA
caatcactataaagccagac

SEQ ID NO: 10458 - RNA, 20 nt, synthetic construct
  misc_feature 1..20: note = spacer sequence
  source 1..20: mol_type = other RNA
ctataaagccagaccaatac

SEQ ID NO: 10459 - RNA, 20 nt, synthetic construct
  misc_feature 1..20: note = spacer sequence
  source 1..20: mol_type = other RNA
agaaagtagagaaagaaaac

SEQ ID NO: 10460 - RNA, 20 nt, synthetic construct
  misc_feature 1..20: note = spacer sequence
  source 1..20: mol_type = other RNA
tgacccagggaattcttagt

SEQ ID NO: 10461 - RNA, 20 nt, synthetic construct
  misc_feature 1..20: note = spacer sequence
  source 1..20: mol_type = other RNA
actttcttgacccagggaat

SEQ ID NO: 10462 - RNA, 20 nt, synthetic construct
  misc_feature 1..20: note = spacer sequence
  source 1..20: mol_type = other RNA
ctactttcttgacccaggga

SEQ ID NO: 10463 - RNA, 20 nt, synthetic construct
  misc_feature 1..20: note = spacer sequence
  source 1..20: mol_type = other RNA
ttctctactttcttgaccca

SEQ ID NO: 10464 - RNA, 20 nt, synthetic construct
  misc_feature 1..20: note = spacer sequence
  source 1..20: mol_type = other RNA
acattcaaaaactcctggga

SEQ ID NO: 10465 - RNA, 20 nt, synthetic construct
  misc_feature 1..20: note = spacer sequence
  source 1..20: mol_type = other RNA
aaaactcctgggataacagc

SEQ ID NO: 10466 - RNA, 20 nt, synthetic construct
  misc_feature 1..20: note = spacer sequence
  source 1..20: mol_type = other RNA
tgggataacagcacaacatg

SEQ ID NO: 10467 - RNA, 20 nt, synthetic construct
  misc_feature 1..20: note = spacer sequence
  source 1..20: mol_type = other RNA
caggagtttttgaatgttga

SEQ ID NO: 10468 - RNA, 20 nt, synthetic construct
  misc_feature 1..20: note = spacer sequence
  source 1..20: mol_type = other RNA
gagacgtttatctaaagaca

SEQ ID NO: 10469 - RNA, 20 nt, synthetic construct
  misc_feature 1..20: note = spacer sequence
  source 1..20: mol_type = other RNA
tttctgagacgtttatctaa

SEQ ID NO: 10470 - RNA, 20 nt, synthetic construct
  misc_feature 1..20: note = spacer sequence
  source 1..20: mol_type = other RNA
aaccccaaacattaacacta

SEQ ID NO: 10471 - RNA, 20 nt, synthetic construct
  misc_feature 1..20: note = spacer sequence
  source 1..20: mol_type = other RNA
ccatcagatgaactaaattc

SEQ ID NO: 10472 - RNA, 20 nt, synthetic construct
  misc_feature 1..20: note = spacer sequence
  source 1..20: mol_type = other RNA
gatgaactaaattctagaag

SEQ ID NO: 10473 - RNA, 20 nt, synthetic construct
  misc_feature 1..20: note = spacer sequence
  source 1..20: mol_type = other RNA
gatggggatgccttattaag

SEQ ID NO: 10474 - RNA, 20 nt, synthetic construct
  misc_feature 1..20: note = spacer sequence
  source 1..20: mol_type = other RNA
tctgatggggatgccttatt

SEQ ID NO: 10475 - RNA, 20 nt, synthetic construct
  misc_feature 1..20: note = spacer sequence
  source 1..20: mol_type = other RNA
gttgcagtaacacacatcag

SEQ ID NO: 10476 - RNA, 20 nt, synthetic construct
  misc_feature 1..20: note = spacer sequence
  source 1..20: mol_type = other RNA
gtctgttgcagtaacacaca

SEQ ID NO: 10477 - RNA, 20 nt, synthetic construct
  misc_feature 1..20: note = spacer sequence
  source 1..20: mol_type = other RNA
ttcagtctgttgcagtaaca

SEQ ID NO: 10478 - RNA, 20 nt, synthetic construct
  misc_feature 1..20: note = spacer sequence
  source 1..20: mol_type = other RNA
actttttcattcagtctgtt

SEQ ID NO: 10479 - RNA, 20 nt, synthetic construct
  misc_feature 1..20: note = spacer sequence
  source 1..20: mol_type = other RNA
ttccactttttcattcagtc

SEQ ID NO: 10480 - RNA, 20 nt, synthetic construct
  misc_feature 1..20: note = spacer sequence
  source 1..20: mol_type = other RNA
tcattccactttttcattca

SEQ ID NO: 10481 - RNA, 20 nt, synthetic construct
  misc_feature 1..20: note = spacer sequence
  source 1..20: mol_type = other RNA
aggttttattaaaccaaagt

SEQ ID NO: 10482 - RNA, 20 nt, synthetic construct
  misc_feature 1..20: note = spacer sequence
  source 1..20: mol_type = other RNA
tttaaactttggtttaataa

SEQ ID NO: 10483 - RNA, 20 nt, synthetic construct
  misc_feature 1..20: note = spacer sequence
  source 1..20: mol_type = other RNA
ttttgcatttttgcacgtca

SEQ ID NO: 10484 - RNA, 20 nt, synthetic construct
  misc_feature 1..20: note = spacer sequence
  source 1..20: mol_type = other RNA
ctctttattaatttttttgt

SEQ ID NO: 10485 - RNA, 20 nt, synthetic construct
  misc_feature 1..20: note = spacer sequence
  source 1..20: mol_type = other RNA
ttattaatttttttgtttta

SEQ ID NO: 10486 - RNA, 20 nt, synthetic construct
  misc_feature 1..20: note = spacer sequence
  source 1..20: mol_type = other RNA
aaaacaaaaaaattaataaa

SEQ ID NO: 10487 - RNA, 20 nt, synthetic construct
  misc_feature 1..20: note = spacer sequence
  source 1..20: mol_type = other RNA
ttaaaaatgttatttatatt

SEQ ID NO: 10488 - RNA, 20 nt, synthetic construct
  misc_feature 1..20: note = spacer sequence
  source 1..20: mol_type = other RNA
gccaccatgcctggctaatt

SEQ ID NO: 10489 - RNA, 20 nt, synthetic construct
  misc_feature 1..20: note = spacer sequence
  source 1..20: mol_type = other RNA
cagctacttgggaggctgag

SEQ ID NO: 10490 - RNA, 20 nt, synthetic construct
  misc_feature 1..20: note = spacer sequence
  source 1..20: mol_type = other RNA
caagtagctgggaccacaaa

SEQ ID NO: 10491 - RNA, 20 nt, synthetic construct
  misc_feature 1..20: note = spacer sequence
  source 1..20: mol_type = other RNA
gcctcccaagtagctgggac

SEQ ID NO: 10492 - RNA, 20 nt, synthetic construct
  misc_feature 1..20: note = spacer sequence
  source 1..20: mol_type = other RNA
cagcctcccaagtagctggg

SEQ ID NO: 10493 - RNA, 20 nt, synthetic construct
  misc_feature 1..20: note = spacer sequence
  source 1..20: mol_type = other RNA
tgtctcagcctcccaagtag

SEQ ID NO: 10494 - RNA, 20 nt, synthetic construct
  misc_feature 1..20: note = spacer sequence
  source 1..20: mol_type = other RNA
tcctgtctcagcctcccaag

SEQ ID NO: 10495 - RNA, 20 nt, synthetic construct
  misc_feature 1..20: note = spacer sequence
  source 1..20: mol_type = other RNA
agccatcctcctgtctcagc

SEQ ID NO: 10496 - RNA, 20 nt, synthetic construct
  misc_feature 1..20: note = spacer sequence
  source 1..20: mol_type = other RNA
tgggctcaagccatcctcct

SEQ ID NO: 10497 - RNA, 20 nt, synthetic construct
  misc_feature 1..20: note = spacer sequence
  source 1..20: mol_type = other RNA
gcctcctgggctcaagccat

SEQ ID NO: 10498 - RNA, 20 nt, synthetic construct
  misc_feature 1..20: note = spacer sequence
  source 1..20: mol_type = other RNA
gtggcccagactagagggca

SEQ ID NO: 10499 - RNA, 20 nt, synthetic construct
  misc_feature 1..20: note = spacer sequence
  source 1..20: mol_type = other RNA
ggctctgtggcccagactag

SEQ ID NO: 10500 - RNA, 20 nt, synthetic construct
  misc_feature 1..20: note = spacer sequence
  source 1..20: mol_type = other RNA
caaaaaacaaataaatgggt

SEQ ID NO: 10501 - RNA, 20 nt, synthetic construct
  misc_feature 1..20: note = spacer sequence
  source 1..20: mol_type = other RNA
aaaaacaaataaatgggtct

SEQ ID NO: 10502 - RNA, 20 nt, synthetic construct
  misc_feature 1..20: note = spacer sequence
  source 1..20: mol_type = other RNA
aaaaccaaaaagtttgagaa

SEQ ID NO: 10503 - RNA, 20 nt, synthetic construct
  misc_feature 1..20: note = spacer sequence
  source 1..20: mol_type = other RNA
aactttttggttttagaccc

SEQ ID NO: 10504 - RNA, 20 nt, synthetic construct
  misc_feature 1..20: note = spacer sequence
  source 1..20: mol_type = other RNA
caaactttttggttttagac

SEQ ID NO: 10505 - RNA, 20 nt, synthetic construct
  misc_feature 1..20: note = spacer sequence
  source 1..20: mol_type = other RNA
tacagaaattcctacacatg

SEQ ID NO: 10506 - RNA, 20 nt, synthetic construct
  misc_feature 1..20: note = spacer sequence
  source 1..20: mol_type = other RNA
gtaggacagctgttctcaaa

SEQ ID NO: 10507 - RNA, 20 nt, synthetic construct
  misc_feature 1..20: note = spacer sequence
  source 1..20: mol_type = other RNA
tacacatgcgcaccaggaga

SEQ ID NO: 10508 - RNA, 20 nt, synthetic construct
  misc_feature 1..20: note = spacer sequence
  source 1..20: mol_type = other RNA
tggtgcgcatgtgtaggaat

SEQ ID NO: 10509 - RNA, 20 nt, synthetic construct
  misc_feature 1..20: note = spacer sequence
  source 1..20: mol_type = other RNA
cctggtgcgcatgtgtagga

SEQ ID NO: 10510 - RNA, 20 nt, synthetic construct
  misc_feature 1..20: note = spacer sequence
  source 1..20: mol_type = other RNA
aacatgtctcctggtgcgca

SEQ ID NO: 10511 - RNA, 20 nt, synthetic construct
  misc_feature 1..20: note = spacer sequence
  source 1..20: mol_type = other RNA
ttgcagcctgtcagcaaaat

SEQ ID NO: 10512 - RNA, 20 nt, synthetic construct
  misc_feature 1..20: note = spacer sequence
  source 1..20: mol_type = other RNA
gcaaaatattaactaatctt

SEQ ID NO: 10513 - RNA, 20 nt, synthetic construct
  misc_feature 1..20: note = spacer sequence
  source 1..20: mol_type = other RNA
taatagacagtattaatatt

SEQ ID NO: 10514 - RNA, 20 nt, synthetic construct
  misc_feature 1..20: note = spacer sequence
  source 1..20: mol_type = other RNA
gagaatattatatattgttt

SEQ ID NO: 10515 - RNA, 20 nt, synthetic construct
  misc_feature 1..20: note = spacer sequence
  source 1..20: mol_type = other RNA
gatactggagtgtagtggca

SEQ ID NO: 10516 - RNA, 20 nt, synthetic construct
  misc_feature 1..20: note = spacer sequence
  source 1..20: mol_type = other RNA
ctgatactggagtgtagtgg

SEQ ID NO: 10517 - RNA, 20 nt, synthetic construct
  misc_feature 1..20: note = spacer sequence
  source 1..20: mol_type = other RNA
ataaacaatatataatattc

SEQ ID NO: 10518 - RNA, 20 nt, synthetic construct
  misc_feature 1..20: note = spacer sequence
  source 1..20: mol_type = other RNA
gtggtccataaacaatatat

SEQ ID NO: 10519 - RNA, 20 nt, synthetic construct
  misc_feature 1..20: note = spacer sequence
  source 1..20: mol_type = other RNA
ctgtggtccataaacaatat

SEQ ID NO: 10520 - RNA, 20 nt, synthetic construct
  misc_feature 1..20: note = spacer sequence
  source 1..20: mol_type = other RNA
aataatttagtattaatctc

SEQ ID NO: 10521 - RNA, 20 nt, synthetic construct
  misc_feature 1..20: note = spacer sequence
  source 1..20: mol_type = other RNA
cctgcaagtgggaggagggt

SEQ ID NO: 10522 - RNA, 20 nt, synthetic construct
  misc_feature 1..20: note = spacer sequence
  source 1..20: mol_type = other RNA
tgcaagtgggaggagggttg

SEQ ID NO: 10523 - RNA, 20 nt, synthetic construct
  misc_feature 1..20: note = spacer sequence
  source 1..20: mol_type = other RNA
cacttgcaggagaggcaatc

SEQ ID NO: 10524 - RNA, 20 nt, synthetic construct
  misc_feature 1..20: note = spacer sequence
  source 1..20: mol_type = other RNA
tcccacttgcaggagaggca

SEQ ID NO: 10525 - RNA, 20 nt, synthetic construct
  misc_feature 1..20: note = spacer sequence
  source 1..20: mol_type = other RNA
ctccaaccccaaccctcctc

SEQ ID NO: 10526 - RNA, 20 nt, synthetic construct
  misc_feature 1..20: note = spacer sequence
  source 1..20: mol_type = other RNA
tcactccaaccccaaccctc

SEQ ID NO: 10527 - RNA, 20 nt, synthetic construct
  misc_feature 1..20: note = spacer sequence
  source 1..20: mol_type = other RNA
tcctcactccaaccccaacc

SEQ ID NO: 10528 - RNA, 20 nt, synthetic construct
  misc_feature 1..20: note = spacer sequence
  source 1..20: mol_type = other RNA
tttcatcctcactccaaccc

SEQ ID NO: 10529 - RNA, 20 nt, synthetic construct
  misc_feature 1..20: note = spacer sequence
  source 1..20: mol_type = other RNA
tcctttcatcctcactccaa

SEQ ID NO: 10530 - RNA, 20 nt, synthetic construct
  misc_feature 1..20: note = spacer sequence
  source 1..20: mol_type = other RNA
taactgttttattttctctg

SEQ ID NO: 10531 - RNA, 20 nt, synthetic construct
  misc_feature 1..20: note = spacer sequence
  source 1..20: mol_type = other RNA
ctgcactatttttgtacttt

SEQ ID NO: 10532 - RNA, 20 nt, synthetic construct
  misc_feature 1..20: note = spacer sequence
  source 1..20: mol_type = other RNA
gcactatttttgtacttttt

SEQ ID NO: 10533 - RNA, 20 nt, synthetic construct
  misc_feature 1..20: note = spacer sequence
  source 1..20: mol_type = other RNA
aggcacggtggcttacgcct

SEQ ID NO: 10534 - RNA, 20 nt, synthetic construct
  misc_feature 1..20: note = spacer sequence
  source 1..20: mol_type = other RNA
aatgtcttaaaactgcagat

SEQ ID NO: 10535 - RNA, 20 nt, synthetic construct
  misc_feature 1..20: note = spacer sequence
  source 1..20: mol_type = other RNA
taaaactgcagatgatgcaa

SEQ ID NO: 10536 - RNA, 20 nt, synthetic construct
  misc_feature 1..20: note = spacer sequence
  source 1..20: mol_type = other RNA
gcagttttaagacatttgaa

SEQ ID NO: 10537 - RNA, 20 nt, synthetic construct
  misc_feature 1..20: note = spacer sequence
  source 1..20: mol_type = other RNA
tctgcagttttaagacattt

SEQ ID NO: 10538 - RNA, 20 nt, synthetic construct
  misc_feature 1..20: note = spacer sequence
  source 1..20: mol_type = other RNA
cactttttttgcatcatctg

SEQ ID NO: 10539 - RNA, 20 nt, synthetic construct
  misc_feature 1..20: note = spacer sequence
  source 1..20: mol_type = other RNA
tcaggatttaggcaagatgg

SEQ ID NO: 10540 - RNA, 20 nt, synthetic construct
  misc_feature 1..20: note = spacer sequence
  source 1..20: mol_type = other RNA
ggatttaggcaagatgggtt

SEQ ID NO: 10541 - RNA, 20 nt, synthetic construct
  misc_feature 1..20: note = spacer sequence
  source 1..20: mol_type = other RNA
tgaagaattgtatcttgccc

SEQ ID NO: 10542 - RNA, 20 nt, synthetic construct
  misc_feature 1..20: note = spacer sequence
  source 1..20: mol_type = other RNA
tgcctaaatcctgaagaatt

SEQ ID NO: 10543 - RNA, 20 nt, synthetic construct
  misc_feature 1..20: note = spacer sequence
  source 1..20: mol_type = other RNA
ttaacccatcttgcctaaat

SEQ ID NO: 10544 - RNA, 20 nt, synthetic construct
  misc_feature 1..20: note = spacer sequence
  source 1..20: mol_type = other RNA
atgggttaaaaaacacaatc

SEQ ID NO: 10545 - RNA, 20 nt, synthetic construct
  misc_feature 1..20: note = spacer sequence
  source 1..20: mol_type = other RNA
ggctgggcgcagtggctcac

SEQ ID NO: 10546 - RNA, 20 nt, synthetic construct
  misc_feature 1..20: note = spacer sequence
  source 1..20: mol_type = other RNA
cacgtgtaatcccagcactt

SEQ ID NO: 10547 - RNA, 20 nt, synthetic construct
  misc_feature 1..20: note = spacer sequence
  source 1..20: mol_type = other RNA
cagcactttgggaggccagg

SEQ ID NO: 10548 - RNA, 20 nt, synthetic construct
  misc_feature 1..20: note = spacer sequence
  source 1..20: mol_type = other RNA
caaagtgctgggattacacg

SEQ ID NO: 10549 - RNA, 20 nt, synthetic construct
  misc_feature 1..20: note = spacer sequence
  source 1..20: mol_type = other RNA
tggcctcccaaagtgctggg

SEQ ID NO: 10550 - RNA, 20 nt, synthetic construct
  misc_feature 1..20: note = spacer sequence
  source 1..20: mol_type = other RNA
accctcctggcctcccaaag

SEQ ID NO: 10551 - RNA, 20 nt, synthetic construct
  misc_feature 1..20: note = spacer sequence
  source 1..20: mol_type = other RNA
cgaggtcaagagatcaagtc

SEQ ID NO: 10552 - RNA, 20 nt, synthetic construct
  misc_feature 1..20: note = spacer sequence
  source 1..20: mol_type = other RNA
tgatccaccctcctggcctc

SEQ ID NO: 10553 - RNA, 20 nt, synthetic construct
  misc_feature 1..20: note = spacer sequence
  source 1..20: mol_type = other RNA
agagatcaagtccatcctgg

SEQ ID NO: 10554 - RNA, 20 nt, synthetic construct
  misc_feature 1..20: note = spacer sequence
  source 1..20: mol_type = other RNA
tgacctcgtgatccaccctc

SEQ ID NO: 10555 - RNA, 20 nt, synthetic construct
  misc_feature 1..20: note = spacer sequence
  source 1..20: mol_type = other RNA
cttgacctcgtgatccaccc

SEQ ID NO: 10556 - RNA, 20 nt, synthetic construct
  misc_feature 1..20: note = spacer sequence
  source 1..20: mol_type = other RNA
agtccatcctggccaacatg

SEQ ID NO: 10557 - RNA, 20 nt, synthetic construct
  misc_feature 1..20: note = spacer sequence
  source 1..20: mol_type = other RNA
atcctggccaacatggtgaa

SEQ ID NO: 10558 - RNA, 20 nt, synthetic construct
  misc_feature 1..20: note = spacer sequence
  source 1..20: mol_type = other RNA
atactctttattctattcca

SEQ ID NO: 10559 - RNA, 20 nt, synthetic construct
  misc_feature 1..20: note = spacer sequence
  source 1..20: mol_type = other RNA
ttattctattccacaaactt

SEQ ID NO: 10560 - RNA, 20 nt, synthetic construct
  misc_feature 1..20: note = spacer sequence
  source 1..20: mol_type = other RNA
attccacaaactttagcaaa

SEQ ID NO: 10561 - RNA, 20 nt, synthetic construct
  misc_feature 1..20: note = spacer sequence
  source 1..20: mol_type = other RNA
acaaactttagcaaattctt

SEQ ID NO: 10562 - RNA, 20 nt, synthetic construct
  misc_feature 1..20: note = spacer sequence
  source 1..20: mol_type = other RNA
tcacattcagaagtatataa

SEQ ID NO: 10563 - RNA, 20 nt, synthetic construct
  misc_feature 1..20: note = spacer sequence
  source 1..20: mol_type = other RNA
cattcagaagtatataaact

SEQ ID NO: 10564 - RNA, 20 nt, synthetic construct
  misc_feature 1..20: note = spacer sequence
  source 1..20: mol_type = other RNA
gaagtatataaactatacaa

SEQ ID NO: 10565 - RNA, 20 nt, synthetic construct
  misc_feature 1..20: note = spacer sequence
  source 1..20: mol_type = other RNA
gaatgtgaagaatttgctaa

SEQ ID NO: 10566 - RNA, 20 nt, synthetic construct
  misc_feature 1..20: note = spacer sequence
  source 1..20: mol_type = other RNA
gttgtatagtttatatactt

SEQ ID NO: 10567 - RNA, 20 nt, synthetic construct
  misc_feature 1..20: note = spacer sequence
  source 1..20: mol_type = other RNA
cctcttgctggtaaactatg

SEQ ID NO: 10568 - RNA, 20 nt, synthetic construct
  misc_feature 1..20: note = spacer sequence
  source 1..20: mol_type = other RNA
tgctggtaaactatgctatt

SEQ ID NO: 10569 - RNA, 20 nt, synthetic construct
  misc_feature 1..20: note = spacer sequence
  source 1..20: mol_type = other RNA
acacccccttccttgaaaat

SEQ ID NO: 10570 - RNA, 20 nt, synthetic construct
  misc_feature 1..20: note = spacer sequence
  source 1..20: mol_type = other RNA
ttgaaaatgctaaagcctct

SEQ ID NO: 10571 - RNA, 20 nt, synthetic construct
  misc_feature 1..20: note = spacer sequence
  source 1..20: mol_type = other RNA
aggaagggggtgtagaatag

SEQ ID NO: 10572 - RNA, 20 nt, synthetic construct
  misc_feature 1..20: note = spacer sequence
  source 1..20: mol_type = other RNA
actcccatctaaaagactag

SEQ ID NO: 10573 - RNA, 20 nt, synthetic construct
  misc_feature 1..20: note = spacer sequence
  source 1..20: mol_type = other RNA
tcggacacaattaaattgga

SEQ ID NO: 10574 - RNA, 20 nt, synthetic construct
  misc_feature 1..20: note = spacer sequence
  source 1..20: mol_type = other RNA
gacacaattaaattggagag

SEQ ID NO: 10575 - RNA, 20 nt, synthetic construct
  misc_feature 1..20: note = spacer sequence
  source 1..20: mol_type = other RNA
gaagataatattttgtatag

SEQ ID NO: 10576 - RNA, 20 nt, synthetic construct
  misc_feature 1..20: note = spacer sequence
  source 1..20: mol_type = other RNA
aatttaattgtgtccgaaga

SEQ ID NO: 10577 - RNA, 20 nt, synthetic construct
  misc_feature 1..20: note = spacer sequence
  source 1..20: mol_type = other RNA
ccaatttaattgtgtccgaa

SEQ ID NO: 10578 - RNA, 20 nt, synthetic construct
  misc_feature 1..20: note = spacer sequence
  source 1..20: mol_type = other RNA
ctccaatttaattgtgtccg

SEQ ID NO: 10579 - RNA, 20 nt, synthetic construct
  misc_feature 1..20: note = spacer sequence
  source 1..20: mol_type = other RNA
caattcaaatcctagttctg

SEQ ID NO: 10580 - RNA, 20 nt, synthetic construct
  misc_feature 1..20: note = spacer sequence
  source 1..20: mol_type = other RNA
aatcctagttctgccattaa

SEQ ID NO: 10581 - RNA, 20 nt, synthetic construct
  misc_feature 1..20: note = spacer sequence
  source 1..20: mol_type = other RNA
tagttctgccattaactagc

SEQ ID NO: 10582 - RNA, 20 nt, synthetic construct
  misc_feature 1..20: note = spacer sequence
  source 1..20: mol_type = other RNA
gccattaactagcaatatgc

SEQ ID NO: 10583 - RNA, 20 nt, synthetic construct
  misc_feature 1..20: note = spacer sequence
  source 1..20: mol_type = other RNA
cctaagggcatattgctagt

SEQ ID NO: 10584 - RNA, 20 nt, synthetic construct
  misc_feature 1..20: note = spacer sequence
  source 1..20: mol_type = other RNA
aagtttaagtcctataagcc

SEQ ID NO: 10585 - RNA, 20 nt, synthetic construct
  misc_feature 1..20: note = spacer sequence
  source 1..20: mol_type = other RNA
tataagcccaactacttgcc

SEQ ID NO: 10586 - RNA, 20 nt, synthetic construct
  misc_feature 1..20: note = spacer sequence
  source 1..20: mol_type = other RNA
acatgattgttccacaatta

SEQ ID NO: 10587 - RNA, 20 nt, synthetic construct
  misc_feature 1..20: note = spacer sequence
  source 1..20: mol_type = other RNA
tgtggaaatttttggcaagt

SEQ ID NO: 10588 - RNA, 20 nt, synthetic construct
  misc_feature 1..20: note = spacer sequence
  source 1..20: mol_type = other RNA
acaattaacctgttcaaaaa

SEQ ID NO: 10589 - RNA, 20 nt, synthetic construct
  misc_feature 1..20: note = spacer sequence
  source 1..20: mol_type = other RNA
aaaatcaaacacattttctt

SEQ ID NO: 10590 - RNA, 20 nt, synthetic construct
  misc_feature 1..20: note = spacer sequence
  source 1..20: mol_type = other RNA
aacacattttcttctctact

SEQ ID NO: 10591 - RNA, 20 nt, synthetic construct
  misc_feature 1..20: note = spacer sequence
  source 1..20: mol_type = other RNA
tctctactaagtaggctttt

SEQ ID NO: 10592 - RNA, 20 nt, synthetic construct
  misc_feature 1..20: note = spacer sequence
  source 1..20: mol_type = other RNA
ctactaagtaggcttttgat

SEQ ID NO: 10593 - RNA, 20 nt, synthetic construct
  misc_feature 1..20: note = spacer sequence
  source 1..20: mol_type = other RNA
actaagtaggcttttgatga

SEQ ID NO: 10594 - RNA, 20 nt, synthetic construct
  misc_feature 1..20: note = spacer sequence
  source 1..20: mol_type = other RNA
aaagcctacttagtagagaa

SEQ ID NO: 10595 - RNA, 20 nt, synthetic construct
  misc_feature 1..20: note = spacer sequence
  source 1..20: mol_type = other RNA
ccactctctcagcccttagg

SEQ ID NO: 10596 - RNA, 20 nt, synthetic construct
  misc_feature 1..20: note = spacer sequence
  source 1..20: mol_type = other RNA
ctcagcccttaggatgtggg

SEQ ID NO: 10597 - RNA, 20 nt, synthetic construct
  misc_feature 1..20: note = spacer sequence
  source 1..20: mol_type = other RNA
cagcccttaggatgtgggga

SEQ ID NO: 10598 - RNA, 20 nt, synthetic construct
  misc_feature 1..20: note = spacer sequence
  source 1..20: mol_type = other RNA
gcccttaggatgtggggaca

SEQ ID NO: 10599 - RNA, 20 nt, synthetic construct
  misc_feature 1..20: note = spacer sequence
  source 1..20: mol_type = other RNA
taagggctgagagagtggtg

SEQ ID NO: 10600 - RNA, 20 nt, synthetic construct
  misc_feature 1..20: note = spacer sequence
  source 1..20: mol_type = other RNA
ccacatcctaagggctgaga

SEQ ID NO: 10601 - RNA, 20 nt, synthetic construct
  misc_feature 1..20: note = spacer sequence
  source 1..20: mol_type = other RNA
gatgccaaggtccatggatt

SEQ ID NO: 10602 - RNA, 20 nt, synthetic construct
  misc_feature 1..20: note = spacer sequence
  source 1..20: mol_type = other RNA
gataggtttataagcacctt

SEQ ID NO: 10603 - RNA, 20 nt, synthetic construct
  misc_feature 1..20: note = spacer sequence
  source 1..20: mol_type = other RNA
atggattcctttggcccaca

SEQ ID NO: 10604 - RNA, 20 nt, synthetic construct
  misc_feature 1..20: note = spacer sequence
  source 1..20: mol_type = other RNA
ttccattgcagtgtggcata

SEQ ID NO: 10605 - RNA, 20 nt, synthetic construct
  misc_feature 1..20: note = spacer sequence
  source 1..20: mol_type = other RNA
caaaggaagctgttctacct

SEQ ID NO: 10606 - RNA, 20 nt, synthetic construct
  misc_feature 1..20: note = spacer sequence
  source 1..20: mol_type = other RNA
tttgggatccttccattgca

SEQ ID NO: 10607 - RNA, 20 nt, synthetic construct
  misc_feature 1..20: note = spacer sequence
  source 1..20: mol_type = other RNA
acctcctattaaaattattt

SEQ ID NO: 10608 - RNA, 20 nt, synthetic construct
  misc_feature 1..20: note = spacer sequence
  source 1..20: mol_type = other RNA
tattaaaattatttgtctaa

SEQ ID NO: 10609 - RNA, 20 nt, synthetic construct
  misc_feature 1..20: note = spacer sequence
  source 1..20: mol_type = other RNA
aagtcttatgtcctctattg

SEQ ID NO: 10610 - RNA, 20 nt, synthetic construct
  misc_feature 1..20: note = spacer sequence
  source 1..20: mol_type = other RNA
tatgtcctctattggattag

SEQ ID NO: 10611 - RNA, 20 nt, synthetic construct
  misc_feature 1..20: note = spacer sequence
  source 1..20: mol_type = other RNA
tctattggattagactttta

SEQ ID NO: 10612 - RNA, 20 nt, synthetic construct
  misc_feature 1..20: note = spacer sequence
  source 1..20: mol_type = other RNA
attggattagacttttaggt

SEQ ID NO: 10613 - RNA, 20 nt, synthetic construct
  misc_feature 1..20: note = spacer sequence
  source 1..20: mol_type = other RNA
aatagaggacataagactta

SEQ ID NO: 10614 - RNA, 20 nt, synthetic construct
  misc_feature 1..20: note = spacer sequence
  source 1..20: mol_type = other RNA
aatccaatagaggacataag

SEQ ID NO: 10615 - RNA, 20 nt, synthetic construct
  misc_feature 1..20: note = spacer sequence
  source 1..20: mol_type = other RNA
cctaaaagtctaatccaata

SEQ ID NO: 10616 - RNA, 20 nt, synthetic construct
  misc_feature 1..20: note = spacer sequence
  source 1..20: mol_type = other RNA
gtcacctaaaagtctaatcc

SEQ ID NO: 10617 - RNA, 20 nt, synthetic construct
  misc_feature 1..20: note = spacer sequence
  source 1..20: mol_type = other RNA
ttggtagctctacagtattc

SEQ ID NO: 10618 - RNA, 20 nt, synthetic construct
  misc_feature 1..20: note = spacer sequence
  source 1..20: mol_type = other RNA
acagtattcaggacatggct

SEQ ID NO: 10619 - RNA, 20 nt, synthetic construct
  misc_feature 1..20: note = spacer sequence
  source 1..20: mol_type = other RNA
ggacatggctgtgcaggtga

SEQ ID NO: 10620 - RNA, 20 nt, synthetic construct
  misc_feature 1..20: note = spacer sequence
  source 1..20: mol_type = other RNA
tgaatactgtagagctacca

SEQ ID NO: 10621 - RNA, 20 nt, synthetic construct
  misc_feature 1..20: note = spacer sequence
  source 1..20: mol_type = other RNA
cctgcacagccatgtcctga

SEQ ID NO: 10622 - RNA, 20 nt, synthetic construct
  misc_feature 1..20: note = spacer sequence
  source 1..20: mol_type = other RNA
aaagtttaagtgaagatcag

SEQ ID NO: 10623 - RNA, 20 nt, synthetic construct
  misc_feature 1..20: note = spacer sequence
  source 1..20: mol_type = other RNA
cttaaacttttgagtgcctg

SEQ ID NO: 10624 - RNA, 20 nt, synthetic construct
  misc_feature 1..20: note = spacer sequence
  source 1..20: mol_type = other RNA
tcacttaaacttttgagtgc

SEQ ID NO: 10625 - RNA, 20 nt, synthetic construct
  misc_feature 1..20: note = spacer sequence
  source 1..20: mol_type = other RNA
gatctcagagattcaagatt

SEQ ID NO: 10626 - RNA, 20 nt, synthetic construct
  misc_feature 1..20: note = spacer sequence
  source 1..20: mol_type = other RNA
gatcttcacttaaacttttg

SEQ ID NO: 10627 - RNA, 20 nt, synthetic construct
  misc_feature 1..20: note = spacer sequence
  source 1..20: mol_type = other RNA
cagagattcaagattatatg

SEQ ID NO: 10628 - RNA, 20 nt, synthetic construct
  misc_feature 1..20: note = spacer sequence
  source 1..20: mol_type = other RNA
gagattcaagattatatggg

SEQ ID NO: 10629 - RNA, 20 nt, synthetic construct
  misc_feature 1..20: note = spacer sequence
  source 1..20: mol_type = other RNA
gagatctgatcttcacttaa

SEQ ID NO: 10630 - RNA, 20 nt, synthetic construct
  misc_feature 1..20: note = spacer sequence
  source 1..20: mol_type = other RNA
ctgagatctgatcttcactt

SEQ ID NO: 10631 - RNA, 20 nt, synthetic construct
  misc_feature 1..20: note = spacer sequence
  source 1..20: mol_type = other RNA
agattatatggggaacgaat

SEQ ID NO: 10632 - RNA, 20 nt, synthetic construct
  misc_feature 1..20: note = spacer sequence
  source 1..20: mol_type = other RNA
tgaatctctgagatctgatc

SEQ ID NO: 10633 - RNA, 20 nt, synthetic construct
  misc_feature 1..20: note = spacer sequence
  source 1..20: mol_type = other RNA
ccatataatcttgaatctct

SEQ ID NO: 10634 - RNA, 20 nt, synthetic construct
  misc_feature 1..20: note = spacer sequence
  source 1..20: mol_type = other RNA
ttccccatataatcttgaat

SEQ ID NO: 10635 - RNA, 20 nt, synthetic construct
  misc_feature 1..20: note = spacer sequence
  source 1..20: mol_type = other RNA
agaacatttcatgaatgggg

SEQ ID NO: 10636 - RNA, 20 nt, synthetic construct
  misc_feature 1..20: note = spacer sequence
  source 1..20: mol_type = other RNA
tgattcgttccccatataat

SEQ ID NO: 10637 - RNA, 20 nt, synthetic construct
  misc_feature 1..20: note = spacer sequence
  source 1..20: mol_type = other RNA
tgaatggggagaaatagttg

SEQ ID NO: 10638 - RNA, 20 nt, synthetic construct
  misc_feature 1..20: note = spacer sequence
  source 1..20: mol_type = other RNA
tgaaatgttcttgattcgtt

SEQ ID NO: 10639 - RNA, 20 nt, synthetic construct
  misc_feature 1..20: note = spacer sequence
  source 1..20: mol_type = other RNA
ccattcatgaaatgttcttg

SEQ ID NO: 10640 - RNA, 20 nt, synthetic construct
  misc_feature 1..20: note = spacer sequence
  source 1..20: mol_type = other RNA
ccccattcatgaaatgttct

SEQ ID NO: 10641 - RNA, 20 nt, synthetic construct
  misc_feature 1..20: note = spacer sequence
  source 1..20: mol_type = other RNA
actatttctccccattcatg

SEQ ID NO: 10642 - RNA, 20 nt, synthetic construct
  misc_feature 1..20: note = spacer sequence
  source 1..20: mol_type = other RNA
caactatttctccccattca

SEQ ID NO: 10643 - RNA, 20 nt, synthetic construct
  misc_feature 1..20: note = spacer sequence
  source 1..20: mol_type = other RNA
agtaggcacagtaagatgaa

SEQ ID NO: 10644 - RNA, 20 nt, synthetic construct
  misc_feature 1..20: note = spacer sequence
  source 1..20: mol_type = other RNA
tactgtgcctacttgatttg

SEQ ID NO: 10645 - RNA, 20 nt, synthetic construct
  misc_feature 1..20: note = spacer sequence
  source 1..20: mol_type = other RNA
tcttactgtgcctacttgat

SEQ ID NO: 10646 - RNA, 20 nt, synthetic construct
  misc_feature 1..20: note = spacer sequence
  source 1..20: mol_type = other RNA
gattaatttctctagaggag

SEQ ID NO: 10647 - RNA, 20 nt, synthetic construct
  misc_feature 1..20: note = spacer sequence
  source 1..20: mol_type = other RNA
gagtttaaaattcatcttac

SEQ ID NO: 10648 - RNA, 20 nt, synthetic construct
  misc_feature 1..20: note = spacer sequence
  source 1..20: mol_type = other RNA
ctagaggagttttaatttag

SEQ ID NO: 10649 - RNA, 20 nt, synthetic construct
  misc_feature 1..20: note = spacer sequence
  source 1..20: mol_type = other RNA
agaggagttttaatttagca

SEQ ID NO: 10650 - RNA, 20 nt, synthetic construct
  misc_feature 1..20: note = spacer sequence
  source 1..20: mol_type = other RNA
agagaaattaatctgagttt

SEQ ID NO: 10651 - RNA, 20 nt, synthetic construct
  misc_feature 1..20: note = spacer sequence
  source 1..20: mol_type = other RNA
tctagagaaattaatctgag

SEQ ID NO: 10652 - RNA, 20 nt, synthetic construct
  misc_feature 1..20: note = spacer sequence
  source 1..20: mol_type = other RNA
gctaaattaaaactcctcta

SEQ ID NO: 10653 - RNA, 20 nt, synthetic construct
  misc_feature 1..20: note = spacer sequence
  source 1..20: mol_type = other RNA
tctgctaaattaaaactcct

SEQ ID NO: 10654 - RNA, 20 nt, synthetic construct
  misc_feature 1..20: note = spacer sequence
  source 1..20: mol_type = other RNA
cttctgctaaattaaaactc

SEQ ID NO: 10655 - RNA, 20 nt, synthetic construct
  misc_feature 1..20: note = spacer sequence
  source 1..20: mol_type = other RNA
ttgcagttcataaagactag

SEQ ID NO: 10656 - RNA, 20 nt, synthetic construct
  misc_feature 1..20: note = spacer sequence
  source 1..20: mol_type = other RNA
taaagactaggaatagaact

SEQ ID NO: 10657 - RNA, 20 nt, synthetic construct
  misc_feature 1..20: note = spacer sequence
  source 1..20: mol_type = other RNA
ttatgaactgcaaagaatgc

SEQ ID NO: 10658 - RNA, 20 nt, synthetic construct
  misc_feature 1..20: note = spacer sequence
  source 1..20: mol_type = other RNA
tagtctttatgaactgcaaa

SEQ ID NO: 10659 - RNA, 20 nt, synthetic construct
  misc_feature 1..20: note = spacer sequence
  source 1..20: mol_type = other RNA
attcctagtctttatgaact

SEQ ID NO: 10660 - RNA, 20 nt, synthetic construct
  misc_feature 1..20: note = spacer sequence
  source 1..20: mol_type = other RNA
gttctattcctagtctttat

SEQ ID NO: 10661 - RNA, 20 nt, synthetic construct
  misc_feature 1..20: note = spacer sequence
  source 1..20: mol_type = other RNA
tttcagttctattcctagtc

SEQ ID NO: 10662 - RNA, 20 nt, synthetic construct
  misc_feature 1..20: note = spacer sequence
  source 1..20: mol_type = other RNA
agttcatttcagttctattc

SEQ ID NO: 10663 - RNA, 20 nt, synthetic construct
  misc_feature 1..20: note = spacer sequence
  source 1..20: mol_type = other RNA
ttttccagttcatttcagtt

SEQ ID NO: 10664 - RNA, 20 nt, synthetic construct
  misc_feature 1..20: note = spacer sequence
  source 1..20: mol_type = other RNA
ttgttcattttccagttcat

SEQ ID NO: 10665 - RNA, 20 nt, synthetic construct
  misc_feature 1..20: note = spacer sequence
  source 1..20: mol_type = other RNA
tatcattgttcattttccag

SEQ ID NO: 10666 - RNA, 20 nt, synthetic construct
  misc_feature 1..20: note = spacer sequence
  source 1..20: mol_type = other RNA
ttttgcacatttaaaaggtc

SEQ ID NO: 10667 - RNA, 20 nt, synthetic construct
  misc_feature 1..20: note = spacer sequence
  source 1..20: mol_type = other RNA
aatatcacttccctttttca

SEQ ID NO: 10668 - RNA, 20 nt, synthetic construct
  misc_feature 1..20: note = spacer sequence
  source 1..20: mol_type = other RNA
cttccctttttcaaggaatc

SEQ ID NO: 10669 - RNA, 20 nt, synthetic construct
  misc_feature 1..20: note = spacer sequence
  source 1..20: mol_type = other RNA
ctttttcaaggaatcaatac

SEQ ID NO: 10670 - RNA, 20 nt, synthetic construct
  misc_feature 1..20: note = spacer sequence
  source 1..20: mol_type = other RNA
aggaatcaataccattccta

SEQ ID NO: 10671 - RNA, 20 nt, synthetic construct
  misc_feature 1..20: note = spacer sequence
  source 1..20: mol_type = other RNA
ttgaaaaagggaagtgatat

SEQ ID NO: 10672 - RNA, 20 nt, synthetic construct
  misc_feature 1..20: note = spacer sequence
  source 1..20: mol_type = other RNA
ataccattcctaactttggt

SEQ ID NO: 10673 - RNA, 20 nt, synthetic construct
  misc_feature 1..20: note = spacer sequence
  source 1..20: mol_type = other RNA
taactttggtttttcaaagt

SEQ ID NO: 10674 - RNA, 20 nt, synthetic construct
  misc_feature 1..20: note = spacer sequence
  source 1..20: mol_type = other RNA
aagtaaaaattactgattgt

SEQ ID NO: 10675 - RNA, 20 nt, synthetic construct
  misc_feature 1..20: note = spacer sequence
  source 1..20: mol_type = other RNA
gtaatttttactttgaaaaa

SEQ ID NO: 10676 - RNA, 20 nt, synthetic construct
  misc_feature 1..20: note = spacer sequence
  source 1..20: mol_type = other RNA
ggattaatagaaaatacttt

SEQ ID NO: 10677 - RNA, 20 nt, synthetic construct
  misc_feature 1..20: note = spacer sequence
  source 1..20: mol_type = other RNA
tgaaaaggcacaatcagtaa

SEQ ID NO: 10678 - RNA, 20 nt, synthetic construct
  misc_feature 1..20: note = spacer sequence
  source 1..20: mol_type = other RNA
attaatcctgaaaaggcaca

SEQ ID NO: 10679 - RNA, 20 nt, synthetic construct
  misc_feature 1..20: note = spacer sequence
  source 1..20: mol_type = other RNA
agcacattgttaagcaaagt

SEQ ID NO: 10680 - RNA, 20 nt, synthetic construct
  misc_feature 1..20: note = spacer sequence
  source 1..20: mol_type = other RNA
acttccataatgcctgaatc

SEQ ID NO: 10681 - RNA, 20 nt, synthetic construct
  misc_feature 1..20: note = spacer sequence
  source 1..20: mol_type = other RNA
ataatgcctgaatcagaata

SEQ ID NO: 10682 - RNA, 20 nt, synthetic construct
  misc_feature 1..20: note = spacer sequence
  source 1..20: mol_type = other RNA
ggcattatggaagttgacat

SEQ ID NO: 10683 - RNA, 20 nt, synthetic construct
  misc_feature 1..20: note = spacer sequence
  source 1..20: mol_type = other RNA
gaatacttctgatcttaaga

SEQ ID NO: 10684 - RNA, 20 nt, synthetic construct
  misc_feature 1..20: note = spacer sequence
  source 1..20: mol_type = other RNA
gattcaggcattatggaagt

SEQ ID NO: 10685 - RNA, 20 nt, synthetic construct
  misc_feature 1..20: note = spacer sequence
  source 1..20: mol_type = other RNA
gatcttaagaataaactaaa

SEQ ID NO: 10686 - RNA, 20 nt, synthetic construct
  misc_feature 1..20: note = spacer sequence
  source 1..20: mol_type = other RNA
gaagtattctgattcaggca

SEQ ID NO: 10687 - RNA, 20 nt, synthetic construct
  misc_feature 1..20: note = spacer sequence
  source 1..20: mol_type = other RNA
taagaataaactaaaaatcc

SEQ ID NO: 10688 - RNA, 20 nt, synthetic construct
  misc_feature 1..20: note = spacer sequence
  source 1..20: mol_type = other RNA
taagatcagaagtattctga

SEQ ID NO: 10689 - RNA, 20 nt, synthetic construct
  misc_feature 1..20: note = spacer sequence
  source 1..20: mol_type = other RNA
tcttctttcatcaaaaacat

SEQ ID NO: 10690 - RNA, 20 nt, synthetic construct
  misc_feature 1..20: note = spacer sequence
  source 1..20: mol_type = other RNA
tctttcatcaaaaacattca

SEQ ID NO: 10691 - RNA, 20 nt, synthetic construct
  misc_feature 1..20: note = spacer sequence
  source 1..20: mol_type = other RNA
ttcatcaaaaacattcattc

SEQ ID NO: 10692 - RNA, 20 nt, synthetic construct
  misc_feature 1..20: note = spacer sequence
  source 1..20: mol_type = other RNA
tcaaaaacattcattcttcc

SEQ ID NO: 10693 - RNA, 20 nt, synthetic construct
  misc_feature 1..20: note = spacer sequence
  source 1..20: mol_type = other RNA
aaaacattcattcttccgat

SEQ ID NO: 10694 - RNA, 20 nt, synthetic construct
  misc_feature 1..20: note = spacer sequence
  source 1..20: mol_type = other RNA
ttcttccgattctgaaataa

SEQ ID NO: 10695 - RNA, 20 nt, synthetic construct
  misc_feature 1..20: note = spacer sequence
  source 1..20: mol_type = other RNA
tccgattctgaaataaattt

SEQ ID NO: 10696 - RNA, 20 nt, synthetic construct
  misc_feature 1..20: note = spacer sequence
  source 1..20: mol_type = other RNA
gattctgaaataaattttta

SEQ ID NO: 10697 - RNA, 20 nt, synthetic construct
  misc_feature 1..20: note = spacer sequence
  source 1..20: mol_type = other RNA
gaagaatgaatgtttttgat

SEQ ID NO: 10698 - RNA, 20 nt, synthetic construct
  misc_feature 1..20: note = spacer sequence
  source 1..20: mol_type = other RNA
gaaataaatttttaaaatac

SEQ ID NO: 10699 - RNA, 20 nt, synthetic construct
  misc_feature 1..20: note = spacer sequence
  source 1..20: mol_type = other RNA
gaatcggaagaatgaatgtt

SEQ ID NO: 10700 - RNA, 20 nt, synthetic construct
  misc_feature 1..20: note = spacer sequence
  source 1..20: mol_type = other RNA
ttgttgggagaaaaatgtac

SEQ ID NO: 10701 - RNA, 20 nt, synthetic construct
  misc_feature 1..20: note = spacer sequence
  source 1..20: mol_type = other RNA
caacaatgaatgtgtatttt

SEQ ID NO: 10702 - RNA, 20 nt, synthetic construct
  misc_feature 1..20: note = spacer sequence
  source 1..20: mol_type = other RNA
cccaacaatgaatgtgtatt

SEQ ID NO: 10703 - RNA, 20 nt, synthetic construct
  misc_feature 1..20: note = spacer sequence
  source 1..20: mol_type = other RNA
agtacatttttctcccaaca

SEQ ID NO: 10704 - RNA, 20 nt, synthetic construct
  misc_feature 1..20: note = spacer sequence
  source 1..20: mol_type = other RNA
cattcaacaattatttgcga

SEQ ID NO: 10705 - RNA, 20 nt, synthetic construct
  misc_feature 1..20: note = spacer sequence
  source 1..20: mol_type = other RNA
ttcaacaattatttgcgagg

SEQ ID NO: 10706 - RNA, 20 nt, synthetic construct
  misc_feature 1..20: note = spacer sequence
  source 1..20: mol_type = other RNA
acaattatttgcgaggcacc

SEQ ID NO: 10707 - RNA, 20 nt, synthetic construct
  misc_feature 1..20: note = spacer sequence
  source 1..20: mol_type = other RNA
caaataattgttgaatgaga

SEQ ID NO: 10708 - RNA, 20 nt, synthetic construct
  misc_feature 1..20: note = spacer sequence
  source 1..20: mol_type = other RNA
aaacaggtgcctcgcaaata

SEQ ID NO: 10709 - RNA, 20 nt, synthetic construct
  misc_feature 1..20: note = spacer sequence
  source 1..20: mol_type = other RNA
accaatcaaaacaggtgcct

SEQ ID NO: 10710 - RNA, 20 nt, synthetic construct
  misc_feature 1..20: note = spacer sequence
  source 1..20: mol_type = other RNA
ctaccaatcaaaacaggtgc

SEQ ID NO: 10711 - RNA, 20 nt, synthetic construct
  misc_feature 1..20: note = spacer sequence
  source 1..20: mol_type = other RNA
ccgcttctctaccaatcaaa

SEQ ID NO: 10712 - RNA, 20 nt, synthetic construct
  misc_feature 1..20: note = spacer sequence
  source 1..20: mol_type = other RNA
tttccccgcttctctaccaa

SEQ ID NO: 10713 - RNA, 20 nt, synthetic construct
  misc_feature 1..20: note = spacer sequence
  source 1..20: mol_type = other RNA
gttcttttccccgcttctct

SEQ ID NO: 10714 - RNA, 20 nt, synthetic construct
  misc_feature 1..20: note = spacer sequence
  source 1..20: mol_type = other RNA
tgccctcatggagccaggag

SEQ ID NO: 10715 - RNA, 20 nt, synthetic construct
  misc_feature 1..20: note = spacer sequence
  source 1..20: mol_type = other RNA
tggagccaggagccaacatg

SEQ ID NO: 10716 - RNA, 20 nt, synthetic construct
  misc_feature 1..20: note = spacer sequence
  source 1..20: mol_type = other RNA
atgagggcaggaagtttcag

SEQ ID NO: 10717 - RNA, 20 nt, synthetic construct
  misc_feature 1..20: note = spacer sequence
  source 1..20: mol_type = other RNA
tggctccatgagggcaggaa

SEQ ID NO: 10718 - RNA, 20 nt, synthetic construct
  misc_feature 1..20: note = spacer sequence
  source 1..20: mol_type = other RNA
ctggcatgttggctcctggc

SEQ ID NO: 10719 - RNA, 20 nt, synthetic construct
  misc_feature 1..20: note = spacer sequence
  source 1..20: mol_type = other RNA
accttcagaaaacaatcagc

SEQ ID NO: 10720 - RNA, 20 nt, synthetic construct
  misc_feature 1..20: note = spacer sequence
  source 1..20: mol_type = other RNA
gaaaacaatcagcttccaac

SEQ ID NO: 10721 - RNA, 20 nt, synthetic construct
  misc_feature 1..20: note = spacer sequence
  source 1..20: mol_type = other RNA
gaaggtagaattcactggca

SEQ ID NO: 10722 - RNA, 20 nt, synthetic construct
  misc_feature 1..20: note = spacer sequence
  source 1..20: mol_type = other RNA
gcttccaaccctgaaatgtt

SEQ ID NO: 10723 - RNA, 20 nt, synthetic construct
  misc_feature 1..20: note = spacer sequence
  source 1..20: mol_type = other RNA
aaccctgaaatgtttggagc

SEQ ID NO: 10724 - RNA, 20 nt, synthetic construct
  misc_feature 1..20: note = spacer sequence
  source 1..20: mol_type = other RNA
gggttggaagctgattgttt

SEQ ID NO: 10725 - RNA, 20 nt, synthetic construct
  misc_feature 1..20: note = spacer sequence
  source 1..20: mol_type = other RNA
aaacatttcagggttggaag

SEQ ID NO: 10726 - RNA, 20 nt, synthetic construct
  misc_feature 1..20: note = spacer sequence
  source 1..20: mol_type = other RNA
caaattctctggcgatcaaa

SEQ ID NO: 10727 - RNA, 20 nt, synthetic construct
  misc_feature 1..20: note = spacer sequence
  source 1..20: mol_type = other RNA
ctggcgatcaaaaactagga

SEQ ID NO: 10728 - RNA, 20 nt, synthetic construct
  misc_feature 1..20: note = spacer sequence
  source 1..20: mol_type = other RNA
ggcgatcaaaaactaggaca

SEQ ID NO: 10729 - RNA, 20 nt, synthetic construct
  misc_feature 1..20: note = spacer sequence
  source 1..20: mol_type = other RNA
ccagagaatttgtgataatg

SEQ ID NO: 10730 - RNA, 20 nt, synthetic construct
  misc_feature 1..20: note = spacer sequence
  source 1..20: mol_type = other RNA
aaaactaggacatattattt

SEQ ID NO: 10731 - RNA, 20 nt, synthetic construct
  misc_feature 1..20: note = spacer sequence
  source 1..20: mol_type = other RNA
tagtttttgatcgccagaga

SEQ ID NO: 10732 - RNA, 20 nt, synthetic construct
  misc_feature 1..20: note = spacer sequence
  source 1..20: mol_type = other RNA
aaacaataaaaataatatgt

SEQ ID NO: 10733 - RNA, 20 nt, synthetic construct
  misc_feature 1..20: note = spacer sequence
  source 1..20: mol_type = other RNA
tcacaactgaacttttacaa

SEQ ID NO: 10734 - RNA, 20 nt, synthetic construct
  misc_feature 1..20: note = spacer sequence
  source 1..20: mol_type = other RNA
caactgaacttttacaagac

SEQ ID NO: 10735 - RNA, 20 nt, synthetic construct
  misc_feature 1..20: note = spacer sequence
  source 1..20: mol_type = other RNA
gttgtgatgattttcaaaac

SEQ ID NO: 10736 - RNA, 20 nt, synthetic construct
  misc_feature 1..20: note = spacer sequence
  source 1..20: mol_type = other RNA
tgtaaaagttcagttgtgat

SEQ ID NO: 10737 - RNA, 20 nt, synthetic construct
  misc_feature 1..20: note = spacer sequence
  source 1..20: mol_type = other RNA
aataccagttgcaacttctg

SEQ ID NO: 10738 - RNA, 20 nt, synthetic construct
  misc_feature 1..20: note = spacer sequence
  source 1..20: mol_type = other RNA
gcagttagggcattttatgt

SEQ ID NO: 10739 - RNA, 20 nt, synthetic construct
  misc_feature 1..20: note = spacer sequence
  source 1..20: mol_type = other RNA
attgaagaaaatcactttta

SEQ ID NO: 10740 - RNA, 20 nt, synthetic construct
  misc_feature 1..20: note = spacer sequence
  source 1..20: mol_type = other RNA
attgatgggtacataaaatg

SEQ ID NO: 10741 - RNA, 20 nt, synthetic construct
  misc_feature 1..20: note = spacer sequence
  source 1..20: mol_type = other RNA
tcaattgatgggtacataaa

SEQ ID NO: 10742 - RNA, 20 nt, synthetic construct
  misc_feature 1..20: note = spacer sequence
  source 1..20: mol_type = other RNA
cttttaggataatttatatg

SEQ ID NO: 10743 - RNA, 20 nt, synthetic construct
  misc_feature 1..20: note = spacer sequence
  source 1..20: mol_type = other RNA
taaaagtgattttcttcaat

SEQ ID NO: 10744 - RNA, 20 nt, synthetic construct
  misc_feature 1..20: note = spacer sequence
  source 1..20: mol_type = other RNA
caactgcagtgtaattggaa

SEQ ID NO: 10745 - RNA, 20 nt, synthetic construct
  misc_feature 1..20: note = spacer sequence
  source 1..20: mol_type = other RNA
actgcagtgtaattggaaag

SEQ ID NO: 10746 - RNA, 20 nt, synthetic construct
  misc_feature 1..20: note = spacer sequence
  source 1..20: mol_type = other RNA
aattacactgcagttgagac

SEQ ID NO: 10747 - RNA, 20 nt, synthetic construct
  misc_feature 1..20: note = spacer sequence
  source 1..20: mol_type = other RNA
catatattatggcactgcaa

SEQ ID NO: 10748 - RNA, 20 nt, synthetic construct
  misc_feature 1..20: note = spacer sequence
  source 1..20: mol_type = other RNA
aaaggaaagttattgcacca

SEQ ID NO: 10749 - RNA, 20 nt, synthetic construct
  misc_feature 1..20: note = spacer sequence
  source 1..20: mol_type = other RNA
tttagatttgcagtgccata

SEQ ID NO: 10750 - RNA, 20 nt, synthetic construct
  misc_feature 1..20: note = spacer sequence
  source 1..20: mol_type = other RNA
gtgagatgcagcacgttttt

SEQ ID NO: 10751 - RNA, 20 nt, synthetic construct
  misc_feature 1..20: note = spacer sequence
  source 1..20: mol_type = other RNA
cagattttgtaggtttactt

SEQ ID NO: 10752 - RNA, 20 nt, synthetic construct
  misc_feature 1..20: note = spacer sequence
  source 1..20: mol_type = other RNA
cacagattttgtaggtttac

SEQ ID NO: 10753 - RNA, 20 nt, synthetic construct
  misc_feature 1..20: note = spacer sequence
  source 1..20: mol_type = other RNA
acacatctcgaactacaaca

SEQ ID NO: 10754 - RNA, 20 nt, synthetic construct
  misc_feature 1..20: note = spacer sequence
  source 1..20: mol_type = other RNA
cgaactacaacatttgattt

SEQ ID NO: 10755 - RNA, 20 nt, synthetic construct
  misc_feature 1..20: note = spacer sequence
  source 1..20: mol_type = other RNA
aactacaacatttgattttt

SEQ ID NO: 10756 - RNA, 20 nt, synthetic construct
  misc_feature 1..20: note = spacer sequence
  source 1..20: mol_type = other RNA
agatgtgtggatgtggcgtt

SEQ ID NO: 10757 - RNA, 20 nt, synthetic construct
  misc_feature 1..20: note = spacer sequence
  source 1..20: mol_type = other RNA
aatgttgtagttcgagatgt

SEQ ID NO: 10758 - RNA, 20 nt, synthetic construct
  misc_feature 1..20: note = spacer sequence
  source 1..20: mol_type = other RNA
atgttgctttatctttggta

SEQ ID NO: 10759 - RNA, 20 nt, synthetic construct
  misc_feature 1..20: note = spacer sequence
  source 1..20: mol_type = other RNA
ttggtatttggaaagggaag

SEQ ID NO: 10760 - RNA, 20 nt, synthetic construct
  misc_feature 1..20: note = spacer sequence
  source 1..20: mol_type = other RNA
aaataccaaagataaagcaa

SEQ ID NO: 10761 - RNA, 20 nt, synthetic construct
  misc_feature 1..20: note = spacer sequence
  source 1..20: mol_type = other RNA
ctttccaaataccaaagata

SEQ ID NO: 10762 - RNA, 20 nt, synthetic construct
  misc_feature 1..20: note = spacer sequence
  source 1..20: mol_type = other RNA
tccctttccaaataccaaag

SEQ ID NO: 10763 - RNA, 20 nt, synthetic construct
  misc_feature 1..20: note = spacer sequence
  source 1..20: mol_type = other RNA
acccatgacaatagttccca

SEQ ID NO: 10764 - RNA, 20 nt, synthetic construct
  misc_feature 1..20: note = spacer sequence
  source 1..20: mol_type = other RNA
tgggttgagttgtattgtct

SEQ ID NO: 10765 - RNA, 20 nt, synthetic construct
  misc_feature 1..20: note = spacer sequence
  source 1..20: mol_type = other RNA
cattctgtaactgcatttta

SEQ ID NO: 10766 - RNA, 20 nt, synthetic construct
  misc_feature 1..20: note = spacer sequence
  source 1..20: mol_type = other RNA
gtaactgcattttaaatcat

SEQ ID NO: 10767 - RNA, 20 nt, synthetic construct
  misc_feature 1..20: note = spacer sequence
  source 1..20: mol_type = other RNA
tcaatggtcaagtctcctcc

SEQ ID NO: 10768 - RNA, 20 nt, synthetic construct
  misc_feature 1..20: note = spacer sequence
  source 1..20: mol_type = other RNA
atggtcaagtctcctcctcc

SEQ ID NO: 10769 - RNA, 20 nt, synthetic construct
  misc_feature 1..20: note = spacer sequence
  source 1..20: mol_type = other RNA
agtctcctcctcccaaatcg

SEQ ID NO: 10770 - RNA, 20 nt, synthetic construct
  misc_feature 1..20: note = spacer sequence
  source 1..20: mol_type = other RNA
cctcctcccaaatcgattct

SEQ ID NO: 10771 - RNA, 20 nt, synthetic construct
  misc_feature 1..20: note = spacer sequence
  source 1..20: mol_type = other RNA
tcctcccaaatcgattctga

SEQ ID NO: 10772 - RNA, 20 nt, synthetic construct
  misc_feature 1..20: note = spacer sequence
  source 1..20: mol_type = other RNA
tcccaaatcgattctgacaa

SEQ ID NO: 10773 - RNA, 20 nt, synthetic construct
  misc_feature 1..20: note = spacer sequence
  source 1..20: mol_type = other RNA
caaatcgattctgacaaata

SEQ ID NO: 10774 - RNA, 20 nt, synthetic construct
  misc_feature 1..20: note = spacer sequence
  source 1..20: mol_type = other RNA
attctgacaaataggatgta

SEQ ID NO: 10775 - RNA, 20 nt, synthetic construct
  misc_feature 1..20: note = spacer sequence
  source 1..20: mol_type = other RNA
atttgggaggaggagacttg

SEQ ID NO: 10776 - RNA, 20 nt, synthetic construct
  misc_feature 1..20: note = spacer sequence
  source 1..20: mol_type = other RNA
gacaaataggatgtatggac

SEQ ID NO: 10777 - RNA, 20 nt, synthetic construct
  misc_feature 1..20: note = spacer sequence
  source 1..20: mol_type = other RNA
gaatcgatttgggaggagga

SEQ ID NO: 10778 - RNA, 20 nt, synthetic construct
  misc_feature 1..20: note = spacer sequence
  source 1..20: mol_type = other RNA
tatttgtcagaatcgatttg

SEQ ID NO: 10779 - RNA, 20 nt, synthetic construct
  misc_feature 1..20: note = spacer sequence
  source 1..20: mol_type = other RNA
atacatcctatttgtcagaa

SEQ ID NO: 10780 - RNA, 20 nt, synthetic construct
  misc_feature 1..20: note = spacer sequence
  source 1..20: mol_type = other RNA
acactccaaaagcaacacct

SEQ ID NO: 10781 - RNA, 20 nt, synthetic construct
  misc_feature 1..20: note = spacer sequence
  source 1..20: mol_type = other RNA
aaaagcaacacctggaatga

SEQ ID NO: 10782 - RNA, 20 nt, synthetic construct
  misc_feature 1..20: note = spacer sequence
  source 1..20: mol_type = other RNA
aggtgttgcttttggagtgt

SEQ ID NO: 10783 - RNA, 20 nt, synthetic construct
  misc_feature 1..20: note = spacer sequence
  source 1..20: mol_type = other RNA
ttccaggtgttgcttttgga

SEQ ID NO: 10784 - RNA, 20 nt, synthetic construct
  misc_feature 1..20: note = spacer sequence
  source 1..20: mol_type = other RNA
gagaaacaactagagaactt

SEQ ID NO: 10785 - RNA, 20 nt, synthetic construct
  misc_feature 1..20: note = spacer sequence
  source 1..20: mol_type = other RNA
gatcattccaggtgttgctt

SEQ ID NO: 10786 - RNA, 20 nt, synthetic construct
  misc_feature 1..20: note = spacer sequence
  source 1..20: mol_type = other RNA
ctgatcattccaggtgttgc

SEQ ID NO: 10787 - RNA, 20 nt, synthetic construct
  misc_feature 1..20: note = spacer sequence
  source 1..20: mol_type = other RNA
agttgtttctctgatcattc

SEQ ID NO: 10788 - RNA, 20 nt, synthetic construct
  misc_feature 1..20: note = spacer sequence
  source 1..20: mol_type = other RNA
ctagttgtttctctgatcat

SEQ ID NO: 10789 - RNA, 20 nt, synthetic construct
  misc_feature 1..20: note = spacer sequence
  source 1..20: mol_type = other RNA
cagtttggagaggttttcac

SEQ ID NO: 10790 - RNA, 20 nt, synthetic construct
  misc_feature 1..20: note = spacer sequence
  source 1..20: mol_type = other RNA
aaactgggaacaaagctgcc

SEQ ID NO: 10791 - RNA, 20 nt, synthetic construct
  misc_feature 1..20: note = spacer sequence
  source 1..20: mol_type = other RNA
ccaaactgggaacaaagctg

SEQ ID NO: 10792 - RNA, 20 nt, synthetic construct
  misc_feature 1..20: note = spacer sequence
  source 1..20: mol_type = other RNA
catgtaaatgtcctcgtaga

SEQ ID NO: 10793 - RNA, 20 nt, synthetic construct
  misc_feature 1..20: note = spacer sequence
  source 1..20: mol_type = other RNA
tcgtagaagggagccgagga

SEQ ID NO: 10794 - RNA, 20 nt, synthetic construct
  misc_feature 1..20: note = spacer sequence
  source 1..20: mol_type = other RNA
tagaagggagccgaggatta

SEQ ID NO: 10795 - RNA, 20 nt, synthetic construct
  misc_feature 1..20: note = spacer sequence
  source 1..20: mol_type = other RNA
acgaggacatttacatgtga

SEQ ID NO: 10796 - RNA, 20 nt, synthetic construct
  misc_feature 1..20: note = spacer sequence
  source 1..20: mol_type = other RNA
cttctacgaggacatttaca

SEQ ID NO: 10797 - RNA, 20 nt, synthetic construct
  misc_feature 1..20: note = spacer sequence
  source 1..20: mol_type = other RNA
gctcccttctacgaggacat

SEQ ID NO: 10798 - RNA, 20 nt, synthetic construct
  misc_feature 1..20: note = spacer sequence
  source 1..20: mol_type = other RNA
tcggctcccttctacgagga

SEQ ID NO: 10799 - RNA, 20 nt, synthetic construct
  misc_feature 1..20: note = spacer sequence
  source 1..20: mol_type = other RNA
ggagggggtgcgagggtagg

SEQ ID NO: 10800 - RNA, 20 nt, synthetic construct
  misc_feature 1..20: note = spacer sequence
  source 1..20: mol_type = other RNA
cgaggtagttaatcctcggc

SEQ ID NO: 10801 - RNA, 20 nt, synthetic construct
  misc_feature 1..20: note = spacer sequence
  source 1..20: mol_type = other RNA
caccccctcccgaggtagtt

SEQ ID NO: 10802 - RNA, 20 nt, synthetic construct
  misc_feature 1..20: note = spacer sequence
  source 1..20: mol_type = other RNA
ctaccctcgcaccccctccc

SEQ ID NO: 10803 - RNA, 20 nt, synthetic construct
  misc_feature 1..20: note = spacer sequence
  source 1..20: mol_type = other RNA
agttccctaccctcgcaccc

SEQ ID NO: 10804 - RNA, 20 nt, synthetic construct
  misc_feature 1..20: note = spacer sequence
  source 1..20: mol_type = other RNA
tccagttccctaccctcgca

SEQ ID NO: 10805 - RNA, 20 nt, synthetic construct
  misc_feature 1..20: note = spacer sequence
  source 1..20: mol_type = other RNA
agcggactaaggcggagcga

SEQ ID NO: 10806 - RNA, 20 nt, synthetic construct
  misc_feature 1..20: note = spacer sequence
  source 1..20: mol_type = other RNA
gctagaaagctggcgttgtc

SEQ ID NO: 10807 - RNA, 20 nt, synthetic construct
  misc_feature 1..20: note = spacer sequence
  source 1..20: mol_type = other RNA
gccttagtccgctagaaagc

SEQ ID NO: 10808 - RNA, 20 nt, synthetic construct
  misc_feature 1..20: note = spacer sequence
  source 1..20: mol_type = other RNA
ctccgccttagtccgctaga

SEQ ID NO: 10809 - RNA, 20 nt, synthetic construct
  misc_feature 1..20: note = spacer sequence
  source 1..20: mol_type = other RNA
tctctcccattcaacttttt

SEQ ID NO: 10810 - RNA, 20 nt, synthetic construct
  misc_feature 1..20: note = spacer sequence
  source 1..20: mol_type = other RNA
ctcccattcaactttttagg

SEQ ID NO: 10811 - RNA, 20 nt, synthetic construct
  misc_feature 1..20: note = spacer sequence
  source 1..20: mol_type = other RNA
cccattcaactttttaggcg

SEQ ID NO: 10812 - RNA, 20 nt, synthetic construct
  misc_feature 1..20: note = spacer sequence
  source 1..20: mol_type = other RNA
cattcaactttttaggcgtc

SEQ ID NO: 10813 - RNA, 20 nt, synthetic construct
  misc_feature 1..20: note = spacer sequence
  source 1..20: mol_type = other RNA
actttttaggcgtcacgttg

SEQ ID NO: 10814 - RNA, 20 nt, synthetic construct
  misc_feature 1..20: note = spacer sequence
  source 1..20: mol_type = other RNA
cgttggggccatagagccta

SEQ ID NO: 10815 - RNA, 20 nt, synthetic construct
  misc_feature 1..20: note = spacer sequence
  source 1..20: mol_type = other RNA
atggccccaacgtgacgcct

SEQ ID NO: 10816 - RNA, 20 nt, synthetic construct
  misc_feature 1..20: note = spacer sequence
  source 1..20: mol_type = other RNA
tataggctctatggccccaa

SEQ ID NO: 10817 - RNA, 20 nt, synthetic construct
  misc_feature 1..20: note = spacer sequence
  source 1..20: mol_type = other RNA
cgactttaaattataacgag

SEQ ID NO: 10818 - RNA, 20 nt, synthetic construct
  misc_feature 1..20: note = spacer sequence
  source 1..20: mol_type = other RNA
tgaacataaccctcttatag

SEQ ID NO: 10819 - RNA, 20 nt, synthetic construct
  misc_feature 1..20: note = spacer sequence
  source 1..20: mol_type = other RNA
ttataatttaaagtcgtgaa

SEQ ID NO: 10820 - RNA, 20 nt, synthetic construct
  misc_feature 1..20: note = spacer sequence
  source 1..20: mol_type = other RNA
ccgtttattagccctatttc

SEQ ID NO: 10821 - RNA, 20 nt, synthetic construct
  misc_feature 1..20: note = spacer sequence
  source 1..20: mol_type = other RNA
gtttattagccctatttccc

SEQ ID NO: 10822 - RNA, 20 nt, synthetic construct
  misc_feature 1..20: note = spacer sequence
  source 1..20: mol_type = other RNA
caagtgcgtgaatcccggag

SEQ ID NO: 10823 - RNA, 20 nt, synthetic construct
  misc_feature 1..20: note = spacer sequence
  source 1..20: mol_type = other RNA
cgcacttgggaaatagggct

SEQ ID NO: 10824 - RNA, 20 nt, synthetic construct
  misc_feature 1..20: note = spacer sequence
  source 1..20: mol_type = other RNA
cggagaagggggatgaacac

SEQ ID NO: 10825 - RNA, 20 nt, synthetic construct
  misc_feature 1..20: note = spacer sequence
  source 1..20: mol_type = other RNA
gggattcacgcacttgggaa

SEQ ID NO: 10826 - RNA, 20 nt, synthetic construct
  misc_feature 1..20: note = spacer sequence
  source 1..20: mol_type = other RNA
ccgggattcacgcacttggg

SEQ ID NO: 10827 - RNA, 20 nt, synthetic construct
  misc_feature 1..20: note = spacer sequence
  source 1..20: mol_type = other RNA
cccttctccgggattcacgc

SEQ ID NO: 10828 - RNA, 20 nt, synthetic construct
  misc_feature 1..20: note = spacer sequence
  source 1..20: mol_type = other RNA
tcccccttctccgggattca

SEQ ID NO: 10829 - RNA, 20 nt, synthetic construct
  misc_feature 1..20: note = spacer sequence
  source 1..20: mol_type = other RNA
tcaactcctcccagacccgg

SEQ ID NO: 10830 - RNA, 20 nt, synthetic construct
  misc_feature 1..20: note = spacer sequence
  source 1..20: mol_type = other RNA
actcctcccagacccgggat

SEQ ID NO: 10831 - RNA, 20 nt, synthetic construct
  misc_feature 1..20: note = spacer sequence
  source 1..20: mol_type = other RNA
tcccagacccgggatcagag

SEQ ID NO: 10832 - RNA, 20 nt, synthetic construct
  misc_feature 1..20: note = spacer sequence
  source 1..20: mol_type = other RNA
cagacccgggatcagagtcc

SEQ ID NO: 10833 - RNA, 20 nt, synthetic construct
  misc_feature 1..20: note = spacer sequence
  source 1..20: mol_type = other RNA
gggaggagttgaagagggtg

SEQ ID NO: 10834 - RNA, 20 nt, synthetic construct
  misc_feature 1..20: note = spacer sequence
  source 1..20: mol_type = other RNA
cgggtctgggaggagttgaa

SEQ ID NO: 10835 - RNA, 20 nt, synthetic construct
  misc_feature 1..20: note = spacer sequence
  source 1..20: mol_type = other RNA
gagtccagccgtcgacgcgc

SEQ ID NO: 10836 - RNA, 20 nt, synthetic construct
  misc_feature 1..20: note = spacer sequence
  source 1..20: mol_type = other RNA
gatcccgggtctgggaggag

SEQ ID NO: 10837 - RNA, 20 nt, synthetic construct
  misc_feature 1..20: note = spacer sequence
  source 1..20: mol_type = other RNA
agccgtcgacgcgccgcggc

SEQ ID NO: 10838 - RNA, 20 nt, synthetic construct
  misc_feature 1..20: note = spacer sequence
  source 1..20: mol_type = other RNA
acgcgccgcggcctgagcaa

SEQ ID NO: 10839 - RNA, 20 nt, synthetic construct
  misc_feature 1..20: note = spacer sequence
  source 1..20: mol_type = other RNA
acggctggactctgatcccg

SEQ ID NO: 10840 - RNA, 20 nt, synthetic construct
  misc_feature 1..20: note = spacer sequence
  source 1..20: mol_type = other RNA
ggccgcggcgcgtcgacggc

SEQ ID NO: 10841 - RNA, 20 nt, synthetic construct
  misc_feature 1..20: note = spacer sequence
  source 1..20: mol_type = other RNA
tgttgctcaggccgcggcgc

SEQ ID NO: 10842 - RNA, 20 nt, synthetic construct
  misc_feature 1..20: note = spacer sequence
  source 1..20: mol_type = other RNA
cctgttgctcaggccgcggc

SEQ ID NO: 10843 - RNA, 20 nt, synthetic construct
  misc_feature 1..20: note = spacer sequence
  source 1..20: mol_type = other RNA
gctctcctgttgctcaggcc

SEQ ID NO: 10844 - RNA, 20 nt, synthetic construct
  misc_feature 1..20: note = spacer sequence
  source 1..20: mol_type = other RNA
ccgccagccccacgaccggc

SEQ ID NO: 10845 - RNA, 20 nt, synthetic construct
  misc_feature 1..20: note = spacer sequence
  source 1..20: mol_type = other RNA
gccagccccacgaccggcag

SEQ ID NO: 10846 - RNA, 20 nt, synthetic construct
  misc_feature 1..20: note = spacer sequence
  source 1..20: mol_type = other RNA
tggggctggcggagaggtgg

SEQ ID NO: 10847 - RNA, 20 nt, synthetic construct
  misc_feature 1..20: note = spacer sequence
  source 1..20: mol_type = other RNA
gccggtcgtggggctggcgg

SEQ ID NO: 10848 - RNA, 20 nt, synthetic construct
  misc_feature 1..20: note = spacer sequence
  source 1..20: mol_type = other RNA
cgctcccccgcccccaaccc

SEQ ID NO: 10849 - RNA, 20 nt, synthetic construct
  misc_feature 1..20: note = spacer sequence
  source 1..20: mol_type = other RNA
cccgcccccaaccccacacg

SEQ ID NO: 10850 - RNA, 20 nt, synthetic construct
  misc_feature 1..20: note = spacer sequence
  source 1..20: mol_type = other RNA
ttcttagccctttgcgggct

SEQ ID NO: 10851 - RNA, 20 nt, synthetic construct
  misc_feature 1..20: note = spacer sequence
  source 1..20: mol_type = other RNA
tagccctttgcgggctcccg

SEQ ID NO: 10852 - RNA, 20 nt, synthetic construct
  misc_feature 1..20: note = spacer sequence
  source 1..20: mol_type = other RNA
cggcactgcgaacccgacaa

SEQ ID NO: 10853 - RNA, 20 nt, synthetic construct
  misc_feature 1..20: note = spacer sequence
  source 1..20: mol_type = other RNA
cagtgccgggagcccgcaaa

SEQ ID NO: 10854 - RNA, 20 nt, synthetic construct
  misc_feature 1..20: note = spacer sequence
  source 1..20: mol_type = other RNA
ggttcgcagtgccgggagcc

SEQ ID NO: 10855 - RNA, 20 nt, synthetic construct
  misc_feature 1..20: note = spacer sequence
  source 1..20: mol_type = other RNA
cggagcagagagcgagggcg

SEQ ID NO: 10856 - RNA, 20 nt, synthetic construct
  misc_feature 1..20: note = spacer sequence
  source 1..20: mol_type = other RNA
gcgagccccgttgtcgggtt

SEQ ID NO: 10857 - RNA, 20 nt, synthetic construct
  misc_feature 1..20: note = spacer sequence
  source 1..20: mol_type = other RNA
gctccgcgagccccgttgtc

SEQ ID NO: 10858 - RNA, 20 nt, synthetic construct
  misc_feature 1..20: note = spacer sequence
  source 1..20: mol_type = other RNA
ctgctccgcgagccccgttg

SEQ ID NO: 10859 - RNA, 20 nt, synthetic construct
  misc_feature 1..20: note = spacer sequence
  source 1..20: mol_type = other RNA
ctctctgctccgcgagcccc

SEQ ID NO: 10860 - RNA, 20 nt, synthetic construct
  misc_feature 1..20: note = spacer sequence
  source 1..20: mol_type = other RNA
gggcgccctcgctctctgct

SEQ ID NO: 10861 - RNA, 20 nt, synthetic construct
  misc_feature 1..20: note = spacer sequence
  source 1..20: mol_type = other RNA
ggtctgggcgccctcgctct

SEQ ID NO: 10862 - RNA, 20 nt, synthetic construct
  misc_feature 1..20: note = spacer sequence
  source 1..20: mol_type = other RNA
aacttggccctttttcgggt

SEQ ID NO: 10863 - RNA, 20 nt, synthetic construct
  misc_feature 1..20: note = spacer sequence
  source 1..20: mol_type = other RNA
tctaacttggccctttttcg

SEQ ID NO: 10864 - RNA, 20 nt, synthetic construct
  misc_feature 1..20: note = spacer sequence
  source 1..20: mol_type = other RNA
gtgcctgttcctctaacttg

SEQ ID NO: 10865 - RNA, 20 nt, synthetic construct
  misc_feature 1..20: note = spacer sequence
  source 1..20: mol_type = other RNA
catagcccaagtctgtgcct

SEQ ID NO: 10866 - RNA, 20 nt, synthetic construct
  misc_feature 1..20: note = spacer sequence
  source 1..20: mol_type = other RNA
cccccttgcggcctcccata

SEQ ID NO: 10867 - RNA, 20 nt, synthetic construct
  misc_feature 1..20: note = spacer sequence
  source 1..20: mol_type = other RNA
cctcgcccccttgcggcctc

SEQ ID NO: 10868 - RNA, 20 nt, synthetic construct
  misc_feature 1..20: note = spacer sequence
  source 1..20: mol_type = other RNA
cccctcgcccccttgcggcc

SEQ ID NO: 10869 - RNA, 20 nt, synthetic construct
  misc_feature 1..20: note = spacer sequence
  source 1..20: mol_type = other RNA
ggcttctcccctcgccccct

SEQ ID NO: 10870 - RNA, 20 nt, synthetic construct
  misc_feature 1..20: note = spacer sequence
  source 1..20: mol_type = other RNA
cggtccgggggtgggcagtg

SEQ ID NO: 10871 - RNA, 20 nt, synthetic construct
  misc_feature 1..20: note = spacer sequence
  source 1..20: mol_type = other RNA
gggggtgggcagtgggggga

SEQ ID NO: 10872 - RNA, 20 nt, synthetic construct
  misc_feature 1..20: note = spacer sequence
  source 1..20: mol_type = other RNA
ccccactgcccacccccgga

SEQ ID NO: 10873 - RNA, 20 nt, synthetic construct
  misc_feature 1..20: note = spacer sequence
  source 1..20: mol_type = other RNA
gttcccgtggtcgccgcgac

SEQ ID NO: 10874 - RNA, 20 nt, synthetic construct
  misc_feature 1..20: note = spacer sequence
  source 1..20: mol_type = other RNA
cgtggtcgccgcgacctctc

SEQ ID NO: 10875 - RNA, 20 nt, synthetic construct
  misc_feature 1..20: note = spacer sequence
  source 1..20: mol_type = other RNA
ccgcgacctctcccgggcca

SEQ ID NO: 10876 - RNA, 20 nt, synthetic construct
  misc_feature 1..20: note = spacer sequence
  source 1..20: mol_type = other RNA
cggcgaccacgggaactgac

SEQ ID NO: 10877 - RNA, 20 nt, synthetic construct
  misc_feature 1..20: note = spacer sequence
  source 1..20: mol_type = other RNA
cccgggccacaggccccgct

SEQ ID NO: 10878 - RNA, 20 nt, synthetic construct
  misc_feature 1..20: note = spacer sequence
  source 1..20: mol_type = other RNA
cgggccacaggccccgctcc

SEQ ID NO: 10879 - RNA, 20 nt, synthetic construct
  misc_feature 1..20: note = spacer sequence
  source 1..20: mol_type = other RNA
gcgcaggccccgccgccccg

SEQ ID NO: 10880 - RNA, 20 nt, synthetic construct
  misc_feature 1..20: note = spacer sequence
  source 1..20: mol_type = other RNA
ggggcggcggggcctgcgcg

SEQ ID NO: 10881 - RNA, 20 nt, synthetic construct
  misc_feature 1..20: note = spacer sequence
  source 1..20: mol_type = other RNA
tgccccggttccggggcggc

SEQ ID NO: 10882 - RNA, 20 nt, synthetic construct
  misc_feature 1..20: note = spacer sequence
  source 1..20: mol_type = other RNA
ccacccggaccaaagcttta

SEQ ID NO: 10883 - RNA, 20 nt, synthetic construct
  misc_feature 1..20: note = spacer sequence
  source 1..20: mol_type = other RNA
gggtggggacgcttcctgcc

SEQ ID NO: 10884 - RNA, 20 nt, synthetic construct
  misc_feature 1..20: note = spacer sequence
  source 1..20: mol_type = other RNA
ggcggcgggagaaacgagcc

SEQ ID NO: 10885 - RNA, 20 nt, synthetic construct
  misc_feature 1..20: note = spacer sequence
  source 1..20: mol_type = other RNA
cgccgccggaggtttaaagc

SEQ ID NO: 10886 - RNA, 20 nt, synthetic construct
  misc_feature 1..20: note = spacer sequence
  source 1..20: mol_type = other RNA
cccgccgccggaggtttaaa

SEQ ID NO: 10887 - RNA, 20 nt, synthetic construct
  misc_feature 1..20: note = spacer sequence
  source 1..20: mol_type = other RNA
tttctcccgccgccggaggt

SEQ ID NO: 10888 - RNA, 20 nt, synthetic construct
  misc_feature 1..20: note = spacer sequence
  source 1..20: mol_type = other RNA
cgcagcaggcccggcacccc

SEQ ID NO: 10889 - RNA, 20 nt, synthetic construct
  misc_feature 1..20: note = spacer sequence
  source 1..20: mol_type = other RNA
tggttgaaggcgttgacggc

SEQ ID NO: 10890 - RNA, 20 nt, synthetic construct
  misc_feature 1..20: note = spacer sequence
  source 1..20: mol_type = other RNA
accaggaggtaaggggtgtt

SEQ ID NO: 10891 - RNA, 20 nt, synthetic construct
  misc_feature 1..20: note = spacer sequence
  source 1..20: mol_type = other RNA
acgccttcaaccaggaggta

SEQ ID NO: 10892 - RNA, 20 nt, synthetic construct
  misc_feature 1..20: note = spacer sequence
  source 1..20: mol_type = other RNA
atgttcgcgctgcggcggcg

SEQ ID NO: 10893 - RNA, 20 nt, synthetic construct
  misc_feature 1..20: note = spacer sequence
  source 1..20: mol_type = other RNA
cgctgcggcggcggctgctc

SEQ ID NO: 10894 - RNA, 20 nt, synthetic construct
  misc_feature 1..20: note = spacer sequence
  source 1..20: mol_type = other RNA
gggcccgccggtcacataga

SEQ ID NO: 10895 - RNA, 20 nt, synthetic construct
  misc_feature 1..20: note = spacer sequence
  source 1..20: mol_type = other RNA
catagacctcgcgccgcggc

SEQ ID NO: 10896 - RNA, 20 nt, synthetic construct
  misc_feature 1..20: note = spacer sequence
  source 1..20: mol_type = other RNA
atgtgaccggcgggcccgga

SEQ ID NO: 10897 - RNA, 20 nt, synthetic construct
  misc_feature 1..20: note = spacer sequence
  source 1..20: mol_type = other RNA
cgccgcggcggagcggggct

SEQ ID NO: 10898 - RNA, 20 nt, synthetic construct
  misc_feature 1..20: note = spacer sequence
  source 1..20: mol_type = other RNA
gccgcggcgcgaggtctatg

SEQ ID NO: 10899 - RNA, 20 nt, synthetic construct
  misc_feature 1..20: note = spacer sequence
  source 1..20: mol_type = other RNA
cagccccgctccgccgcggc

SEQ ID NO: 10900 - RNA, 20 nt, synthetic construct
  misc_feature 1..20: note = spacer sequence
  source 1..20: mol_type = other RNA
ccccggccaccaggcccggc

SEQ ID NO: 10901 - RNA, 20 nt, synthetic construct
  misc_feature 1..20: note = spacer sequence
  source 1..20: mol_type = other RNA
cctccccccggccaccaggc

SEQ ID NO: 10902 - RNA, 20 nt, synthetic construct
  misc_feature 1..20: note = spacer sequence
  source 1..20: mol_type = other RNA
tcgcctccccccggccacca

SEQ ID NO: 10903 - RNA, 20 nt, synthetic construct
  misc_feature 1..20: note = spacer sequence
  source 1..20: mol_type = other RNA
gccgctcgtcgcctcccccc

SEQ ID NO: 10904 - RNA, 20 nt, synthetic construct
  misc_feature 1..20: note = spacer sequence
  source 1..20: mol_type = other RNA
gaggcccgggcaggaagagg

SEQ ID NO: 10905 - RNA, 20 nt, synthetic construct
  misc_feature 1..20: note = spacer sequence
  source 1..20: mol_type = other RNA
gactccgccgctcgtcgcct

SEQ ID NO: 10906 - RNA, 20 nt, synthetic construct
  misc_feature 1..20: note = spacer sequence
  source 1..20: mol_type = other RNA
tgcccgggcctcggactccg

SEQ ID NO: 10907 - RNA, 20 nt, synthetic construct
  misc_feature 1..20: note = spacer sequence
  source 1..20: mol_type = other RNA
tcctgcccgggcctcggact

SEQ ID NO: 10908 - RNA, 20 nt, synthetic construct
  misc_feature 1..20: note = spacer sequence
  source 1..20: mol_type = other RNA
ggcgcagcctcttcctgccc

SEQ ID NO: 10909 - RNA, 20 nt, synthetic construct
  misc_feature 1..20: note = spacer sequence
  source 1..20: mol_type = other RNA
ccgcttcgggcgcagcctct

SEQ ID NO: 10910 - RNA, 20 nt, synthetic construct
  misc_feature 1..20: note = spacer sequence
  source 1..20: mol_type = other RNA
gccgcccgcctcgccgcttc

SEQ ID NO: 10911 - RNA, 20 nt, synthetic construct
  misc_feature 1..20: note = spacer sequence
  source 1..20: mol_type = other RNA
gcctcggccgcccgcctcgc

SEQ ID NO: 10912 - RNA, 20 nt, synthetic construct
  misc_feature 1..20: note = spacer sequence
  source 1..20: mol_type = other RNA
gcctctgcctcggccgcccg

SEQ ID NO: 10913 - RNA, 20 nt, synthetic construct
  misc_feature 1..20: note = spacer sequence
  source 1..20: mol_type = other RNA
ccgcctctgcctcggccgcc

SEQ ID NO: 10914 - RNA, 20 nt, synthetic construct
  misc_feature 1..20: note = spacer sequence
  source 1..20: mol_type = other RNA
cagtcccgttcgcaggatga

SEQ ID NO: 10915 - RNA, 20 nt, synthetic construct
  misc_feature 1..20: note = spacer sequence
  source 1..20: mol_type = other RNA
gtcccgttcgcaggatgagg

SEQ ID NO: 10916 - RNA, 20 nt, synthetic construct
  misc_feature 1..20: note = spacer sequence
  source 1..20: mol_type = other RNA
cgttcgcaggatgaggaaaa

SEQ ID NO: 10917 - RNA, 20 nt, synthetic construct
  misc_feature 1..20: note = spacer sequence
  source 1..20: mol_type = other RNA
caggatgaggaaaaggaggc

SEQ ID NO: 10918 - RNA, 20 nt, synthetic construct
  misc_feature 1..20: note = spacer sequence
  source 1..20: mol_type = other RNA
tgcgaacgggactgagaggg

SEQ ID NO: 10919 - RNA, 20 nt, synthetic construct
  misc_feature 1..20: note = spacer sequence
  source 1..20: mol_type = other RNA
tcctgcgaacgggactgaga

SEQ ID NO: 10920 - RNA, 20 nt, synthetic construct
  misc_feature 1..20: note = spacer sequence
  source 1..20: mol_type = other RNA
tcatcctgcgaacgggactg

SEQ ID NO: 10921 - RNA, 20 nt, synthetic construct
  misc_feature 1..20: note = spacer sequence
  source 1..20: mol_type = other RNA
ttttcctcatcctgcgaacg

SEQ ID NO: 10922 - RNA, 20 nt, synthetic construct
  misc_feature 1..20: note = spacer sequence
  source 1..20: mol_type = other RNA
tcaacatgtccgtttggtgg

SEQ ID NO: 10923 - RNA, 20 nt, synthetic construct
  misc_feature 1..20: note = spacer sequence
  source 1..20: mol_type = other RNA
acatgtccgtttggtggtgg

SEQ ID NO: 10924 - RNA, 20 nt, synthetic construct
  misc_feature 1..20: note = spacer sequence
  source 1..20: mol_type = other RNA
gtttggtggtggcggctgcg

SEQ ID NO: 10925 - RNA, 20 nt, synthetic construct
  misc_feature 1..20: note = spacer sequence
  source 1..20: mol_type = other RNA
gcgtctcgctgacacggccc

SEQ ID NO: 10926 - RNA, 20 nt, synthetic construct
  misc_feature 1..20: note = spacer sequence
  source 1..20: mol_type = other RNA
cgctgacacggccccccgcg

SEQ ID NO: 10927 - RNA, 20 nt, synthetic construct
  misc_feature 1..20: note = spacer sequence
  source 1..20: mol_type = other RNA
ctgacacggccccccgcgcc

SEQ ID NO: 10928 - RNA, 20 nt, synthetic construct
  misc_feature 1..20: note = spacer sequence
  source 1..20: mol_type = other RNA
gcgagacgcagagcgcagcc

SEQ ID NO: 10929 - RNA, 20 nt, synthetic construct
  misc_feature 1..20: note = spacer sequence
  source 1..20: mol_type = other RNA
cgcactggctcacactggcc

SEQ ID NO: 10930 - RNA, 20 nt, synthetic construct
  misc_feature 1..20: note = spacer sequence
  source 1..20: mol_type = other RNA
cactggcccggccggcgagc

SEQ ID NO: 10931 - RNA, 20 nt, synthetic construct
  misc_feature 1..20: note = spacer sequence
  source 1..20: mol_type = other RNA
ccggccgggccagtgtgagc

SEQ ID NO: 10932 - RNA, 20 nt, synthetic construct
  misc_feature 1..20: note = spacer sequence
  source 1..20: mol_type = other RNA
ctctccctctctccagcggg

SEQ ID NO: 10933 - RNA, 20 nt, synthetic construct
  misc_feature 1..20: note = spacer sequence
  source 1..20: mol_type = other RNA
ctccctctctccagcgggat

SEQ ID NO: 10934 - RNA, 20 nt, synthetic construct
  misc_feature 1..20: note = spacer sequence
  source 1..20: mol_type = other RNA
ccctctctccagcgggatgg

SEQ ID NO: 10935 - RNA, 20 nt, synthetic construct
  misc_feature 1..20: note = spacer sequence
  source 1..20: mol_type = other RNA
ctctctccagcgggatggcg

SEQ ID NO: 10936 - RNA, 20 nt, synthetic construct
  misc_feature 1..20: note = spacer sequence
  source 1..20: mol_type = other RNA
ctccagcgggatggcggcag

SEQ ID NO: 10937 - RNA, 20 nt, synthetic construct
  misc_feature 1..20: note = spacer sequence
  source 1..20: mol_type = other RNA
ccagcgggatggcggcagcg

SEQ ID NO: 10938 - RNA, 20 nt, synthetic construct
  misc_feature 1..20: note = spacer sequence
  source 1..20: mol_type = other RNA
agcgggatggcggcagcggc

SEQ ID NO: 10939 - RNA, 20 nt, synthetic construct
  misc_feature 1..20: note = spacer sequence
  source 1..20: mol_type = other RNA
cgctggagagagggagagag

SEQ ID NO: 10940 - RNA, 20 nt, synthetic construct
  misc_feature 1..20: note = spacer sequence
  source 1..20: mol_type = other RNA
ggccgctgccgccatcccgc

SEQ ID NO: 10941 - RNA, 20 nt, synthetic construct
  misc_feature 1..20: note = spacer sequence
  source 1..20: mol_type = other RNA
acgccgcgcggggcaccctg

SEQ ID NO: 10942 - RNA, 20 nt, synthetic construct
  misc_feature 1..20: note = spacer sequence
  source 1..20: mol_type = other RNA
cagggtgccccgcgcggcgt

SEQ ID NO: 10943 - RNA, 20 nt, synthetic construct
  misc_feature 1..20: note = spacer sequence
  source 1..20: mol_type = other RNA
ggcctcccggcgcttcctgt

SEQ ID NO: 10944 - RNA, 20 nt, synthetic construct
  misc_feature 1..20: note = spacer sequence
  source 1..20: mol_type = other RNA
cggcgcttcctgtgcccggc

SEQ ID NO: 10945 - RNA, 20 nt, synthetic construct
  misc_feature 1..20: note = spacer sequence
  source 1..20: mol_type = other RNA
tgtgcccggcgttcgccccg

SEQ ID NO: 10946 - RNA, 20 nt, synthetic construct
  misc_feature 1..20: note = spacer sequence
  source 1..20: mol_type = other RNA
ccccgccccgtcgcgctggc

SEQ ID NO: 10947 - RNA, 20 nt, synthetic construct
  misc_feature 1..20: note = spacer sequence
  source 1..20: mol_type = other RNA
cgctggccccgccccctccc

SEQ ID NO: 10948 - RNA, 20 nt, synthetic construct
  misc_feature 1..20: note = spacer sequence
  source 1..20: mol_type = other RNA
ccgcctcgtcccgccctgcg

SEQ ID NO: 10949 - RNA, 20 nt, synthetic construct
  misc_feature 1..20: note = spacer sequence
  source 1..20: mol_type = other RNA
tcccgccctgcgccgccctg

SEQ ID NO: 10950 - RNA, 20 nt, synthetic construct
  misc_feature 1..20: note = spacer sequence
  source 1..20: mol_type = other RNA
cgccctgcgccgccctgcac

SEQ ID NO: 10951 - RNA, 20 nt, synthetic construct
  misc_feature 1..20: note = spacer sequence
  source 1..20: mol_type = other RNA
cgcgccagcagccctgcacg

SEQ ID NO: 10952 - RNA, 20 nt, synthetic construct
  misc_feature 1..20: note = spacer sequence
  source 1..20: mol_type = other RNA
cggcgtcacgcgccagcagc

SEQ ID NO: 10953 - RNA, 20 nt, synthetic construct
  misc_feature 1..20: note = spacer sequence
  source 1..20: mol_type = other RNA
cgccggcggcggcggcggcc

SEQ ID NO: 10954 - RNA, 20 nt, synthetic construct
  misc_feature 1..20: note = spacer sequence
  source 1..20: mol_type = other RNA
ccggcccgcggccgcggccg

SEQ ID NO: 10955 - RNA, 20 nt, synthetic construct
  misc_feature 1..20: note = spacer sequence
  source 1..20: mol_type = other RNA
ccccggcccgcggccgcggc

SEQ ID NO: 10956 - RNA, 20 nt, synthetic construct
  misc_feature 1..20: note = spacer sequence
  source 1..20: mol_type = other RNA
gcaaggccgtctccccggcc

SEQ ID NO: 10957 - RNA, 20 nt, synthetic construct
  misc_feature 1..20: note = spacer sequence
  source 1..20: mol_type = other RNA
cgcgctctgcaaggccgtct

SEQ ID NO: 10958 - RNA, 20 nt, synthetic construct
  misc_feature 1..20: note = spacer sequence
  source 1..20: mol_type = other RNA
cagggctgcgagggtgaccc

SEQ ID NO: 10959 - RNA, 20 nt, synthetic construct
  misc_feature 1..20: note = spacer sequence
  source 1..20: mol_type = other RNA
cagccctgggatcccgcgct

SEQ ID NO: 10960 - RNA, 20 nt, synthetic construct
  misc_feature 1..20: note = spacer sequence
  source 1..20: mol_type = other RNA
ccctcgcagccctgggatcc

SEQ ID NO: 10961 - RNA, 20 nt, synthetic construct
  misc_feature 1..20: note = spacer sequence
  source 1..20: mol_type = other RNA
gggtcaccctcgcagccctg

SEQ ID NO: 10962 - RNA, 20 nt, synthetic construct
  misc_feature 1..20: note = spacer sequence
  source 1..20: mol_type = other RNA
gctcgacgcggtgctcccgg

SEQ ID NO: 10963 - RNA, 20 nt, synthetic construct
  misc_feature 1..20: note = spacer sequence
  source 1..20: mol_type = other RNA
acgcggtgctcccggggtgc

SEQ ID NO: 10964 - RNA, 20 nt, synthetic construct
  misc_feature 1..20: note = spacer sequence
  source 1..20: mol_type = other RNA
agcggagcgcgcgtgcgcca

SEQ ID NO: 10965 - RNA, 20 nt, synthetic construct
  misc_feature 1..20: note = spacer sequence
  source 1..20: mol_type = other RNA
cggggtgcgtctctgcgaaa

SEQ ID NO: 10966 - RNA, 20 nt, synthetic construct
  misc_feature 1..20: note = spacer sequence
  source 1..20: mol_type = other RNA
ctgcgaaacgctcggcccta

SEQ ID NO: 10967 - RNA, 20 nt, synthetic construct
  misc_feature 1..20: note = spacer sequence
  source 1..20: mol_type = other RNA
gcgaaacgctcggccctaac

SEQ ID NO: 10968 - RNA, 20 nt, synthetic construct
  misc_feature 1..20: note = spacer sequence
  source 1..20: mol_type = other RNA
cagagacgcaccccgggagc

SEQ ID NO: 10969 - RNA, 20 nt, synthetic construct
  misc_feature 1..20: note = spacer sequence
  source 1..20: mol_type = other RNA
gccctaaccggccctgcacc

SEQ ID NO: 10970 - RNA, 20 nt, synthetic construct
  misc_feature 1..20: note = spacer sequence
  source 1..20: mol_type = other RNA
gtgcccgccgcccccgccgg

SEQ ID NO: 10971 - RNA, 20 nt, synthetic construct
  misc_feature 1..20: note = spacer sequence
  source 1..20: mol_type = other RNA
cggctgccgcgaacaaaggg

SEQ ID NO: 10972 - RNA, 20 nt, synthetic construct
  misc_feature 1..20: note = spacer sequence
  source 1..20: mol_type = other RNA
gctgccgcgaacaaagggcg

SEQ ID NO: 10973 - RNA, 20 nt, synthetic construct
  misc_feature 1..20: note = spacer sequence
  source 1..20: mol_type = other RNA
cggcagccgagagccagcgg

SEQ ID NO: 10974 - RNA, 20 nt, synthetic construct
  misc_feature 1..20: note = spacer sequence
  source 1..20: mol_type = other RNA
tgcgccctttgttcgcggca

SEQ ID NO: 10975 - RNA, 20 nt, synthetic construct
  misc_feature 1..20: note = spacer sequence
  source 1..20: mol_type = other RNA
gctctctgggcgtgcctttg

SEQ ID NO: 10976 - RNA, 20 nt, synthetic construct
  misc_feature 1..20: note = spacer sequence
  source 1..20: mol_type = other RNA
ctgggcgtgcctttgcaggc

SEQ ID NO: 10977 - RNA, 20 nt, synthetic construct
  misc_feature 1..20: note = spacer sequence
  source 1..20: mol_type = other RNA
gggcgtgcctttgcaggccc

SEQ ID NO: 10978 - RNA, 20 nt, synthetic construct
  misc_feature 1..20: note = spacer sequence
  source 1..20: mol_type = other RNA
tgcgctctgctggggaaaag

SEQ ID NO: 10979 - RNA, 20 nt, synthetic construct
  misc_feature 1..20: note = spacer sequence
  source 1..20: mol_type = other RNA
gctggggaaaagaaaaaaag

SEQ ID NO: 10980 - RNA, 20 nt, synthetic construct
  misc_feature 1..20: note = spacer sequence
  source 1..20: mol_type = other RNA
ccagcagagcgcacgagggc

SEQ ID NO: 10981 - RNA, 20 nt, synthetic construct
  misc_feature 1..20: note = spacer sequence
  source 1..20: mol_type = other RNA
tttccccagcagagcgcacg

SEQ ID NO: 10982 - RNA, 20 nt, synthetic construct
  misc_feature 1..20: note = spacer sequence
  source 1..20: mol_type = other RNA
gccaatgccagtgcagctgt

SEQ ID NO: 10983 - RNA, 20 nt, synthetic construct
  misc_feature 1..20: note = spacer sequence
  source 1..20: mol_type = other RNA
gctgtagttgtgcaggttaa

SEQ ID NO: 10984 - RNA, 20 nt, synthetic construct
  misc_feature 1..20: note = spacer sequence
  source 1..20: mol_type = other RNA
gcgcgagcgaaaacaccgag

SEQ ID NO: 10985 - RNA, 20 nt, synthetic construct
  misc_feature 1..20: note = spacer sequence
  source 1..20: mol_type = other RNA
cgcagaattaacctgcacaa

SEQ ID NO: 10986 - RNA, 20 nt, synthetic construct
  misc_feature 1..20: note = spacer sequence
  source 1..20: mol_type = other RNA
ctcgcgcagaattaacctgc

SEQ ID NO: 10987 - RNA, 20 nt, synthetic construct
  misc_feature 1..20: note = spacer sequence
  source 1..20: mol_type = other RNA
gtgttttcgctcgcgcagaa

SEQ ID NO: 10988 - RNA, 20 nt, synthetic construct
  misc_feature 1..20: note = spacer sequence
  source 1..20: mol_type = other RNA
cggtgttttcgctcgcgcag

SEQ ID NO: 10989 - RNA, 20 nt, synthetic construct
  misc_feature 1..20: note = spacer sequence
  source 1..20: mol_type = other RNA
ttctcggtgttttcgctcgc

SEQ ID NO: 10990 - RNA, 20 nt, synthetic construct
  misc_feature 1..20: note = spacer sequence
  source 1..20: mol_type = other RNA
ggcactggatatccacgcag

SEQ ID NO: 10991 - RNA, 20 nt, synthetic construct
  misc_feature 1..20: note = spacer sequence
  source 1..20: mol_type = other RNA
agtgcctgaacgtctttctc

SEQ ID NO: 10992 - RNA, 20 nt, synthetic construct
  misc_feature 1..20: note = spacer sequence
  source 1..20: mol_type = other RNA
acgcaggccttaaggaaccc

SEQ ID NO: 10993 - RNA, 20 nt, synthetic construct
  misc_feature 1..20: note = spacer sequence
  source 1..20: mol_type = other RNA
ttaaggcctgcgtggatatc

SEQ ID NO: 10994 - RNA, 20 nt, synthetic construct
  misc_feature 1..20: note = spacer sequence
  source 1..20: mol_type = other RNA
tggcacaaggctgcacaggg

SEQ ID NO: 10995 - RNA, 20 nt, synthetic construct
  misc_feature 1..20: note = spacer sequence
  source 1..20: mol_type = other RNA
cgtggcacaaggctgcacag

SEQ ID NO: 10996 - RNA, 20 nt, synthetic construct
  misc_feature 1..20: note = spacer sequence
  source 1..20: mol_type = other RNA
tctcgtggcacaaggctgca

SEQ ID NO: 10997 - RNA, 20 nt, synthetic construct
  misc_feature 1..20: note = spacer sequence
  source 1..20: mol_type = other RNA
actcctctcgtggcacaagg

SEQ ID NO: 10998 - RNA, 20 nt, synthetic construct
  misc_feature 1..20: note = spacer sequence
  source 1..20: mol_type = other RNA
ctaactttcacgctgattcc

SEQ ID NO: 10999 - RNA, 20 nt, synthetic construct
  misc_feature 1..20: note = spacer sequence
  source 1..20: mol_type = other RNA
cgctgattcctcaaaccaag

SEQ ID NO: 11000 - RNA, 20 nt, synthetic construct
  misc_feature 1..20: note = spacer sequence
  source 1..20: mol_type = other RNA
gcgtgaaagttagtgaatcc

SEQ ID NO: 11001 - RNA, 20 nt, synthetic construct
  misc_feature 1..20: note = spacer sequence
  source 1..20: mol_type = other RNA
tcaaaccaagttgtttcatt

SEQ ID NO: 11002 - RNA, 20 nt, synthetic construct
  misc_feature 1..20: note = spacer sequence
  source 1..20: mol_type = other RNA
aaccaagttgtttcattttt

SEQ ID NO: 11003 - RNA, 20 nt, synthetic construct
  misc_feature 1..20: note = spacer sequence
  source 1..20: mol_type = other RNA
tttttggccaaaactcttta

SEQ ID NO: 11004 - RNA, 20 nt, synthetic construct
  misc_feature 1..20: note = spacer sequence
  source 1..20: mol_type = other RNA
ttatgttgatcactttcctt

SEQ ID NO: 11005 - RNA, 20 nt, synthetic construct
  misc_feature 1..20: note = spacer sequence
  source 1..20: mol_type = other RNA
acataaagagttttggccaa

SEQ ID NO: 11006 - RNA, 20 nt, synthetic construct
  misc_feature 1..20: note = spacer sequence
  source 1..20: mol_type = other RNA
ctttccttgagtacctactg

SEQ ID NO: 11007 - RNA, 20 nt, synthetic construct
  misc_feature 1..20: note = spacer sequence
  source 1..20: mol_type = other RNA
ttgagtacctactgtctgcc

SEQ ID NO: 11008 - RNA, 20 nt, synthetic construct
  misc_feature 1..20: note = spacer sequence
  source 1..20: mol_type = other RNA
aggaaagtgatcaacataaa

SEQ ID NO: 11009 - RNA, 20 nt, synthetic construct
  misc_feature 1..20: note = spacer sequence
  source 1..20: mol_type = other RNA
gcctagtgttggagacatgg

SEQ ID NO: 11010 - RNA, 20 nt, synthetic construct
  misc_feature 1..20: note = spacer sequence
  source 1..20: mol_type = other RNA
aacactaggcagacagtagg

SEQ ID NO: 11011 - RNA, 20 nt, synthetic construct
  misc_feature 1..20: note = spacer sequence
  source 1..20: mol_type = other RNA
ccaacactaggcagacagta

SEQ ID NO: 11012 - RNA, 20 nt, synthetic construct
  misc_feature 1..20: note = spacer sequence
  source 1..20: mol_type = other RNA
atgtctccaacactaggcag

SEQ ID NO: 11013 - RNA, 20 nt, synthetic construct
  misc_feature 1..20: note = spacer sequence
  source 1..20: mol_type = other RNA
tttatttccatgtctccaac

SEQ ID NO: 11014 - RNA, 20 nt, synthetic construct
  misc_feature 1..20: note = spacer sequence
  source 1..20: mol_type = other RNA
ggcaaaacaattatcgttta

SEQ ID NO: 11015 - RNA, 20 nt, synthetic construct
  misc_feature 1..20: note = spacer sequence
  source 1..20: mol_type = other RNA
actaaactgtgctgttttca

SEQ ID NO: 11016 - RNA, 20 nt, synthetic construct
  misc_feature 1..20: note = spacer sequence
  source 1..20: mol_type = other RNA
ccactaaactgtgctgtttt

SEQ ID NO: 11017 - RNA, 20 nt, synthetic construct
  misc_feature 1..20: note = spacer sequence
  source 1..20: mol_type = other RNA
tctccactaaactgtgctgt

SEQ ID NO: 11018 - RNA, 20 nt, synthetic construct
  misc_feature 1..20: note = spacer sequence
  source 1..20: mol_type = other RNA
gtcctctccactaaactgtg

SEQ ID NO: 11019 - RNA, 20 nt, synthetic construct
  misc_feature 1..20: note = spacer sequence
  source 1..20: mol_type = other RNA
gttgtctgtcctctccacta

SEQ ID NO: 11020 - RNA, 20 nt, synthetic construct
  misc_feature 1..20: note = spacer sequence
  source 1..20: mol_type = other RNA
gctcagttgtctgtcctctc

SEQ ID NO: 11021 - RNA, 20 nt, synthetic construct
  misc_feature 1..20: note = spacer sequence
  source 1..20: mol_type = other RNA
cagggcctgtgccctaacac

SEQ ID NO: 11022 - RNA, 20 nt, synthetic construct
  misc_feature 1..20: note = spacer sequence
  source 1..20: mol_type = other RNA
tttcccagggcctgtgccct

SEQ ID NO: 11023 - RNA, 20 nt, synthetic construct
  misc_feature 1..20: note = spacer sequence
  source 1..20: mol_type = other RNA
cgtttcccagggcctgtgcc

SEQ ID NO: 11024 - RNA, 20 nt, synthetic construct
  misc_feature 1..20: note = spacer sequence
  source 1..20: mol_type = other RNA
ttctcgtttcccagggcctg

SEQ ID NO: 11025 - RNA, 20 nt, synthetic construct
  misc_feature 1..20: note = spacer sequence
  source 1..20: mol_type = other RNA
gacaggaagtccaggctaca

SEQ ID NO: 11026 - RNA, 20 nt, synthetic construct
  misc_feature 1..20: note = spacer sequence
  source 1..20: mol_type = other RNA
gaggcgcatctttctcgttt

SEQ ID NO: 11027 - RNA, 20 nt, synthetic construct
  misc_feature 1..20: note = spacer sequence
  source 1..20: mol_type = other RNA
tgtcggaggcgcatctttct

SEQ ID NO: 11028 - RNA, 20 nt, synthetic construct
  misc_feature 1..20: note = spacer sequence
  source 1..20: mol_type = other RNA
aggctacatctggagggagg

SEQ ID NO: 11029 - RNA, 20 nt, synthetic construct
  misc_feature 1..20: note = spacer sequence
  source 1..20: mol_type = other RNA
ggagggaggagaggcctgca

SEQ ID NO: 11030 - RNA, 20 nt, synthetic construct
  misc_feature 1..20: note = spacer sequence
  source 1..20: mol_type = other RNA
agatgtagcctggacttcct

SEQ ID NO: 11031 - RNA, 20 nt, synthetic construct
  misc_feature 1..20: note = spacer sequence
  source 1..20: mol_type = other RNA
ctccagatgtagcctggact

SEQ ID NO: 11032 - RNA, 20 nt, synthetic construct
  misc_feature 1..20: note = spacer sequence
  source 1..20: mol_type = other RNA
tccctccagatgtagcctgg

SEQ ID NO: 11033 - RNA, 20 nt, synthetic construct
  misc_feature 1..20: note = spacer sequence
  source 1..20: mol_type = other RNA
cctccctccagatgtagcct

SEQ ID NO: 11034 - RNA, 20 nt, synthetic construct
  misc_feature 1..20: note = spacer sequence
  source 1..20: mol_type = other RNA
gcaggcctctcctccctcca

SEQ ID NO: 11035 - RNA, 20 nt, synthetic construct
  misc_feature 1..20: note = spacer sequence
  source 1..20: mol_type = other RNA
ggctctgcaggcctctcctc

SEQ ID NO: 11036 - RNA, 20 nt, synthetic construct
  misc_feature 1..20: note = spacer sequence
  source 1..20: mol_type = other RNA
tcaggctctgcaggcctctc

SEQ ID NO: 11037 - RNA, 20 nt, synthetic construct
  misc_feature 1..20: note = spacer sequence
  source 1..20: mol_type = other RNA
tcatcaggctctgcaggcct

SEQ ID NO: 11038 - RNA, 20 nt, synthetic construct
  misc_feature 1..20: note = spacer sequence
  source 1..20: mol_type = other RNA
cctcccccgaaggaggacca

SEQ ID NO: 11039 - RNA, 20 nt, synthetic construct
  misc_feature 1..20: note = spacer sequence
  source 1..20: mol_type = other RNA
cccgaaggaggaccagctgg

SEQ ID NO: 11040 - RNA, 20 nt, synthetic construct
  misc_feature 1..20: note = spacer sequence
  source 1..20: mol_type = other RNA
ggggaggtgatggtggcagt

SEQ ID NO: 11041 - RNA, 20 nt, synthetic construct
  misc_feature 1..20: note = spacer sequence
  source 1..20: mol_type = other RNA
ttcgggggaggtgatggtgg

SEQ ID NO: 11042 - RNA, 20 nt, synthetic construct
  misc_feature 1..20: note = spacer sequence
  source 1..20: mol_type = other RNA
tccttcgggggaggtgatgg

SEQ ID NO: 11043 - RNA, 20 nt, synthetic construct
  misc_feature 1..20: note = spacer sequence
  source 1..20: mol_type = other RNA
agctggtcctccttcggggg

SEQ ID NO: 11044 - RNA, 20 nt, synthetic construct
  misc_feature 1..20: note = spacer sequence
  source 1..20: mol_type = other RNA
gctccagctggtcctccttc

SEQ ID NO: 11045 - RNA, 20 nt, synthetic construct
  misc_feature 1..20: note = spacer sequence
  source 1..20: mol_type = other RNA
tcagctccagctggtcctcc

SEQ ID NO: 11046 - RNA, 20 nt, synthetic construct
  misc_feature 1..20: note = spacer sequence
  source 1..20: mol_type = other RNA
accttgctcctcagctccag

SEQ ID NO: 11047 - RNA, 20 nt, synthetic construct
  misc_feature 1..20: note = spacer sequence
  source 1..20: mol_type = other RNA
gtccaccttgctcctcagct

SEQ ID NO: 11048 - RNA, 20 nt, synthetic construct
  misc_feature 1..20: note = spacer sequence
  source 1..20: mol_type = other RNA
cagtccaccttgctcctcag

SEQ ID NO: 11049 - RNA, 20 nt, synthetic construct
  misc_feature 1..20: note = spacer sequence
  source 1..20: mol_type = other RNA
ctcagtccaccttgctcctc

SEQ ID NO: 11050 - RNA, 20 nt, synthetic construct
  misc_feature 1..20: note = spacer sequence
  source 1..20: mol_type = other RNA
tctctcagtccaccttgctc

SEQ ID NO: 11051 - RNA, 20 nt, synthetic construct
  misc_feature 1..20: note = spacer sequence
  source 1..20: mol_type = other RNA
cctctctcagtccaccttgc

SEQ ID NO: 11052 - RNA, 20 nt, synthetic construct
  misc_feature 1..20: note = spacer sequence
  source 1..20: mol_type = other RNA
ctctcctctctcagtccacc

SEQ ID NO: 11053 - RNA, 20 nt, synthetic construct
  misc_feature 1..20: note = spacer sequence
  source 1..20: mol_type = other RNA
cactctcctctctcagtcca

SEQ ID NO: 11054 - RNA, 20 nt, synthetic construct
  misc_feature 1..20: note = spacer sequence
  source 1..20: mol_type = other RNA
ttatggtctcactctcctct

SEQ ID NO: 11055 - RNA, 20 nt, synthetic construct
  misc_feature 1..20: note = spacer sequence
  source 1..20: mol_type = other RNA
tccagagtttggattttgcc

SEQ ID NO: 11056 - RNA, 20 nt, synthetic construct
  misc_feature 1..20: note = spacer sequence
  source 1..20: mol_type = other RNA
agagtttggattttgccccc

SEQ ID NO: 11057 - RNA, 20 nt, synthetic construct
  misc_feature 1..20: note = spacer sequence
  source 1..20: mol_type = other RNA
ggaagagcaaagcctcttta

SEQ ID NO: 11058 - RNA, 20 nt, synthetic construct
  misc_feature 1..20: note = spacer sequence
  source 1..20: mol_type = other RNA
aaactctggaagagcaaagc

SEQ ID NO: 11059 - RNA, 20 nt, synthetic construct
  misc_feature 1..20: note = spacer sequence
  source 1..20: mol_type = other RNA
gccttatgggggcaaaatcc

SEQ ID NO: 11060 - RNA, 20 nt, synthetic construct
  misc_feature 1..20: note = spacer sequence
  source 1..20: mol_type = other RNA
cctctgccttatgggggcaa

SEQ ID NO: 11061 - RNA, 20 nt, synthetic construct
  misc_feature 1..20: note = spacer sequence
  source 1..20: mol_type = other RNA
agggctcccctctgccttat

SEQ ID NO: 11062 - RNA, 20 nt, synthetic construct
  misc_feature 1..20: note = spacer sequence
  source 1..20: mol_type = other RNA
cctttcaagggctcccctct

SEQ ID NO: 11063 - RNA, 20 nt, synthetic construct
  misc_feature 1..20: note = spacer sequence
  source 1..20: mol_type = other RNA
accttcccctttcaagggct

SEQ ID NO: 11064 - RNA, 20 nt, synthetic construct
  misc_feature 1..20: note = spacer sequence
  source 1..20: mol_type = other RNA
ctccaccttcccctttcaag

SEQ ID NO: 11065 - RNA, 20 nt, synthetic construct
  misc_feature 1..20: note = spacer sequence
  source 1..20: mol_type = other RNA
atcactccaccttccccttt

SEQ ID NO: 11066 - RNA, 20 nt, synthetic construct
  misc_feature 1..20: note = spacer sequence
  source 1..20: mol_type = other RNA
ctcagaaggatggtgcaaag

SEQ ID NO: 11067 - RNA, 20 nt, synthetic construct
  misc_feature 1..20: note = spacer sequence
  source 1..20: mol_type = other RNA
cagaaggatggtgcaaagta

SEQ ID NO: 11068 - RNA, 20 nt, synthetic construct
  misc_feature 1..20: note = spacer sequence
  source 1..20: mol_type = other RNA
gaaggatggtgcaaagtagt

SEQ ID NO: 11069 - RNA, 20 nt, synthetic construct
  misc_feature 1..20: note = spacer sequence
  source 1..20: mol_type = other RNA
gagagaacactgcatccatc

SEQ ID NO: 11070 - RNA, 20 nt, synthetic construct
  misc_feature 1..20: note = spacer sequence
  source 1..20: mol_type = other RNA
ttctgagagaacactgcatc

SEQ ID NO: 11071 - RNA, 20 nt, synthetic construct
  misc_feature 1..20: note = spacer sequence
  source 1..20: mol_type = other RNA
tactactttgcaccatcctt

SEQ ID NO: 11072 - RNA, 20 nt, synthetic construct
  misc_feature 1..20: note = spacer sequence
  source 1..20: mol_type = other RNA
tcttactactttgcaccatc

SEQ ID NO: 11073 - RNA, 20 nt, synthetic construct
  misc_feature 1..20: note = spacer sequence
  source 1..20: mol_type = other RNA
cctcttactactttgcacca

SEQ ID NO: 11074 - RNA, 20 nt, synthetic construct
  misc_feature 1..20: note = spacer sequence
  source 1..20: mol_type = other RNA
ctgtctcctcttactacttt

SEQ ID NO: 11075 - RNA, 20 nt, synthetic construct
  misc_feature 1..20: note = spacer sequence
  source 1..20: mol_type = other RNA
ttccctgtctcctcttacta

SEQ ID NO: 11076 - RNA, 20 nt, synthetic construct
  misc_feature 1..20: note = spacer sequence
  source 1..20: mol_type = other RNA
ttctttccctgtctcctctt

SEQ ID NO: 11077 - RNA, 20 nt, synthetic construct
  misc_feature 1..20: note = spacer sequence
  source 1..20: mol_type = other RNA
cagggggctggggtcattct

SEQ ID NO: 11078 - RNA, 20 nt, synthetic construct
  misc_feature 1..20: note = spacer sequence
  source 1..20: mol_type = other RNA
ttttcccagggggctggggt

SEQ ID NO: 11079 - RNA, 20 nt, synthetic construct
  misc_feature 1..20: note = spacer sequence
  source 1..20: mol_type = other RNA
gccctcattttcccaggggg

SEQ ID NO: 11080 - RNA, 20 nt, synthetic construct
  misc_feature 1..20: note = spacer sequence
  source 1..20: mol_type = other RNA
ccaccaccttcagccctcat

SEQ ID NO: 11081 - RNA, 20 nt, synthetic construct
  misc_feature 1..20: note = spacer sequence
  source 1..20: mol_type = other RNA
atcgccaccaccttcagccc

SEQ ID NO: 11082 - RNA, 20 nt, synthetic construct
  misc_feature 1..20: note = spacer sequence
  source 1..20: mol_type = other RNA
ctatcgccaccaccttcagc

SEQ ID NO: 11083 - RNA, 20 nt, synthetic construct
  misc_feature 1..20: note = spacer sequence
  source 1..20: mol_type = other RNA
ttctctatcgccaccacctt

SEQ ID NO: 11084 - RNA, 20 nt, synthetic construct
  misc_feature 1..20: note = spacer sequence
  source 1..20: mol_type = other RNA
tccttctctatcgccaccac

SEQ ID NO: 11085 - RNA, 20 nt, synthetic construct
  misc_feature 1..20: note = spacer sequence
  source 1..20: mol_type = other RNA
gttcttccttctctatcgcc

SEQ ID NO: 11086 - RNA, 20 nt, synthetic construct
  misc_feature 1..20: note = spacer sequence
  source 1..20: mol_type = other RNA
taaacatctgttcttccttc

SEQ ID NO: 11087 - RNA, 20 nt, synthetic construct
  misc_feature 1..20: note = spacer sequence
  source 1..20: mol_type = other RNA
acttcctaaacatctgttct

SEQ ID NO: 11088 - RNA, 20 nt, synthetic construct
  misc_feature 1..20: note = spacer sequence
  source 1..20: mol_type = other RNA
actccacttcctaaacatct

SEQ ID NO: 11089 - RNA, 20 nt, synthetic construct
  misc_feature 1..20: note = spacer sequence
  source 1..20: mol_type = other RNA
gcccttccactccacttcct

SEQ ID NO: 11090 - RNA, 20 nt, synthetic construct
  misc_feature 1..20: note = spacer sequence
  source 1..20: mol_type = other RNA
gcctcagcccttccactcca

SEQ ID NO: 11091 - RNA, 20 nt, synthetic construct
  misc_feature 1..20: note = spacer sequence
  source 1..20: mol_type = other RNA
cagttactctgcctcagccc

SEQ ID NO: 11092 - RNA, 20 nt, synthetic construct
  misc_feature 1..20: note = spacer sequence
  source 1..20: mol_type = other RNA
aggaggatgcccacagcctg

SEQ ID NO: 11093 - RNA, 20 nt, synthetic construct
  misc_feature 1..20: note = spacer sequence
  source 1..20: mol_type = other RNA
ttgacaccccctttattaac

SEQ ID NO: 11094 - RNA, 20 nt, synthetic construct
  misc_feature 1..20: note = spacer sequence
  source 1..20: mol_type = other RNA
tccttgacaccccctttatt

SEQ ID NO: 11095 - RNA, 20 nt, synthetic construct
  misc_feature 1..20: note = spacer sequence
  source 1..20: mol_type = other RNA
ggctgtgggcatcctccttg

SEQ ID NO: 11096 - RNA, 20 nt, synthetic construct
  misc_feature 1..20: note = spacer sequence
  source 1..20: mol_type = other RNA
agtcaggctgtgggcatcct

SEQ ID NO: 11097 - RNA, 20 nt, synthetic construct
  misc_feature 1..20: note = spacer sequence
  source 1..20: mol_type = other RNA
tcaagtcaggctgtgggcat

SEQ ID NO: 11098 - RNA, 20 nt, synthetic construct
  misc_feature 1..20: note = spacer sequence
  source 1..20: mol_type = other RNA
ttcatcaagtcaggctgtgg

SEQ ID NO: 11099 - RNA, 20 nt, synthetic construct
  misc_feature 1..20: note = spacer sequence
  source 1..20: mol_type = other RNA
taaacccaccacccaggtca

SEQ ID NO: 11100 - RNA, 20 nt, synthetic construct
  misc_feature 1..20: note = spacer sequence
  source 1..20: mol_type = other RNA
acgtaggggatttatgggga

SEQ ID NO: 11101 - RNA, 20 nt, synthetic construct
  misc_feature 1..20: note = spacer sequence
  source 1..20: mol_type = other RNA
cctacgttgactcataaacc

SEQ ID NO: 11102 - RNA, 20 nt, synthetic construct
  misc_feature 1..20: note = spacer sequence
  source 1..20: mol_type = other RNA
ccataaatcccctacgttga

SEQ ID NO: 11103 - RNA, 20 nt, synthetic construct
  misc_feature 1..20: note = spacer sequence
  source 1..20: mol_type = other RNA
tccccataaatcccctacgt

SEQ ID NO: 11104 - RNA, 20 nt, synthetic construct
  misc_feature 1..20: note = spacer sequence
  source 1..20: mol_type = other RNA
aacccacgccttcttcccca

SEQ ID NO: 11105 - RNA, 20 nt, synthetic construct
  misc_feature 1..20: note = spacer sequence
  source 1..20: mol_type = other RNA
ctcaaacccacgccttcttc

SEQ ID NO: 11106 - RNA, 20 nt, synthetic construct
  misc_feature 1..20: note = spacer sequence
  source 1..20: mol_type = other RNA
tccctcaaacccacgccttc

SEQ ID NO: 11107 - RNA, 20 nt, synthetic construct
  misc_feature 1..20: note = spacer sequence
  source 1..20: mol_type = other RNA
gtcttccctcaaacccacgc

SEQ ID NO: 11108 - RNA, 20 nt, synthetic construct
  misc_feature 1..20: note = spacer sequence
  source 1..20: mol_type = other RNA
ttctgtcttccctcaaaccc

SEQ ID NO: 11109 - RNA, 20 nt, synthetic construct
  misc_feature 1..20: note = spacer sequence
  source 1..20: mol_type = other RNA
cttaccatgtgccaacgtct

SEQ ID NO: 11110 - RNA, 20 nt, synthetic construct
  misc_feature 1..20: note = spacer sequence
  source 1..20: mol_type = other RNA
gctgacatgctattctgtac

SEQ ID NO: 11111 - RNA, 20 nt, synthetic construct
  misc_feature 1..20: note = spacer sequence
  source 1..20: mol_type = other RNA
gcagacgttggcacatggta

SEQ ID NO: 11112 - RNA, 20 nt, synthetic construct
  misc_feature 1..20: note = spacer sequence
  source 1..20: mol_type = other RNA
gtactctccgtaacaggctt

SEQ ID NO: 11113 - RNA, 20 nt, synthetic construct
  misc_feature 1..20: note = spacer sequence
  source 1..20: mol_type = other RNA
ccgtaacaggcttctgggtg

SEQ ID NO: 11114 - RNA, 20 nt, synthetic construct
  misc_feature 1..20: note = spacer sequence
  source 1..20: mol_type = other RNA
gtaacaggcttctgggtgag

SEQ ID NO: 11115 - RNA, 20 nt, synthetic construct
  misc_feature 1..20: note = spacer sequence
  source 1..20: mol_type = other RNA
gggtgaggtgtccattagta

SEQ ID NO: 11116 - RNA, 20 nt, synthetic construct
  misc_feature 1..20: note = spacer sequence
  source 1..20: mol_type = other RNA
cccagaagcctgttacggag

SEQ ID NO: 11117 - RNA, 20 nt, synthetic construct
  misc_feature 1..20: note = spacer sequence
  source 1..20: mol_type = other RNA
attagtaatgccctcatttt

SEQ ID NO: 11118 - RNA, 20 nt, synthetic construct
  misc_feature 1..20: note = spacer sequence
  source 1..20: mol_type = other RNA
ttttataattcagggagtga

SEQ ID NO: 11119 - RNA, 20 nt, synthetic construct
  misc_feature 1..20: note = spacer sequence
  source 1..20: mol_type = other RNA
gggagtgagttaattaatgt

SEQ ID NO: 11120 - RNA, 20 nt, synthetic construct
  misc_feature 1..20: note = spacer sequence
  source 1..20: mol_type = other RNA
ctgaattataaaatgagggc

SEQ ID NO: 11121 - RNA, 20 nt, synthetic construct
  misc_feature 1..20: note = spacer sequence
  source 1..20: mol_type = other RNA
ctccctgaattataaaatga

SEQ ID NO: 11122 - RNA, 20 nt, synthetic construct
  misc_feature 1..20: note = spacer sequence
  source 1..20: mol_type = other RNA
cacagctggatcatttccct

SEQ ID NO: 11123 - RNA, 20 nt, synthetic construct
  misc_feature 1..20: note = spacer sequence
  source 1..20: mol_type = other RNA
agctgtgtgaccttgggcac

SEQ ID NO: 11124 - RNA, 20 nt, synthetic construct
  misc_feature 1..20: note = spacer sequence
  source 1..20: mol_type = other RNA
tttccctttggtgcctgtgg

SEQ ID NO: 11125 - RNA, 20 nt, synthetic construct
  misc_feature 1..20: note = spacer sequence
  source 1..20: mol_type = other RNA
ctttggtgcctgtggagttt

SEQ ID NO: 11126 - RNA, 20 nt, synthetic construct
  misc_feature 1..20: note = spacer sequence
  source 1..20: mol_type = other RNA
acaggcaccaaagggaaatg

SEQ ID NO: 11127 - RNA, 20 nt, synthetic construct
  misc_feature 1..20: note = spacer sequence
  source 1..20: mol_type = other RNA
aactccacaggcaccaaagg

SEQ ID NO: 11128 - RNA, 20 nt, synthetic construct
  misc_feature 1..20: note = spacer sequence
  source 1..20: mol_type = other RNA
caggcgcagctcaaactcca

SEQ ID NO: 11129 - RNA, 20 nt, synthetic construct
  misc_feature 1..20: note = spacer sequence
  source 1..20: mol_type = other RNA
cttacttgtcccaggcgcag

SEQ ID NO: 11130 - RNA, 20 nt, synthetic construct
  misc_feature 1..20: note = spacer sequence
  source 1..20: mol_type = other RNA
tcacttacttgtcccaggcg

SEQ ID NO: 11131 - RNA, 20 nt, synthetic construct
  misc_feature 1..20: note = spacer sequence
  source 1..20: mol_type = other RNA
aggaggcagttgggtaaaca

SEQ ID NO: 11132 - RNA, 20 nt, synthetic construct
  misc_feature 1..20: note = spacer sequence
  source 1..20: mol_type = other RNA
tagacatcctcacttacttg

SEQ ID NO: 11133 - RNA, 20 nt, synthetic construct
  misc_feature 1..20: note = spacer sequence
  source 1..20: mol_type = other RNA
gcaagtgtttacccaactgc

SEQ ID NO: 11134 - RNA, 20 nt, synthetic construct
  misc_feature 1..20: note = spacer sequence
  source 1..20: mol_type = other RNA
ggagcgatggctgagatgat

SEQ ID NO: 11135 - RNA, 20 nt, synthetic construct
  misc_feature 1..20: note = spacer sequence
  source 1..20: mol_type = other RNA
tgactctgcaagtgtttacc

SEQ ID NO: 11136 - RNA, 20 nt, synthetic construct
  misc_feature 1..20: note = spacer sequence
  source 1..20: mol_type = other RNA
ctcctgactctgcaagtgtt

SEQ ID NO: 11137 - RNA, 20 nt, synthetic construct
  misc_feature 1..20: note = spacer sequence
  source 1..20: mol_type = other RNA
gccatcgctcctgactctgc

SEQ ID NO: 11138 - RNA, 20 nt, synthetic construct
  misc_feature 1..20: note = spacer sequence
  source 1..20: mol_type = other RNA
cagccatcgctcctgactct

SEQ ID NO: 11139 - RNA, 20 nt, synthetic construct
  misc_feature 1..20: note = spacer sequence
  source 1..20: mol_type = other RNA
tctcagccatcgctcctgac

SEQ ID NO: 11140 - RNA, 20 nt, synthetic construct
  misc_feature 1..20: note = spacer sequence
  source 1..20: mol_type = other RNA
atcatctcagccatcgctcc

SEQ ID NO: 11141 - RNA, 20 nt, synthetic construct
  misc_feature 1..20: note = spacer sequence
  source 1..20: mol_type = other RNA
gggagtcattagtgcacagc

SEQ ID NO: 11142 - RNA, 20 nt, synthetic construct
  misc_feature 1..20: note = spacer sequence
  source 1..20: mol_type = other RNA
cagatttctatcatctcagc

SEQ ID NO: 11143 - RNA, 20 nt, synthetic construct
  misc_feature 1..20: note = spacer sequence
  source 1..20: mol_type = other RNA
ttagtgcacagctagtggtg

SEQ ID NO: 11144 - RNA, 20 nt, synthetic construct
  misc_feature 1..20: note = spacer sequence
  source 1..20: mol_type = other RNA
accactagctgtgcactaat

SEQ ID NO: 11145 - RNA, 20 nt, synthetic construct
  misc_feature 1..20: note = spacer sequence
  source 1..20: mol_type = other RNA
ttccaccactagctgtgcac

SEQ ID NO: 11146 - RNA, 20 nt, synthetic construct
  misc_feature 1..20: note = spacer sequence
  source 1..20: mol_type = other RNA
gctccttccaccactagctg

SEQ ID NO: 11147 - RNA, 20 nt, synthetic construct
  misc_feature 1..20: note = spacer sequence
  source 1..20: mol_type = other RNA
atttcagctccttccaccac

SEQ ID NO: 11148 - RNA, 20 nt, synthetic construct
  misc_feature 1..20: note = spacer sequence
  source 1..20: mol_type = other RNA
ccctatctatttcagctcct

SEQ ID NO: 11149 - RNA, 20 nt, synthetic construct
  misc_feature 1..20: note = spacer sequence
  source 1..20: mol_type = other RNA
tgggctttttccccctatct

SEQ ID NO: 11150 - RNA, 20 nt, synthetic construct
  misc_feature 1..20: note = spacer sequence
  source 1..20: mol_type = other RNA
cttacatacccgtgttcctg

SEQ ID NO: 11151 - RNA, 20 nt, synthetic construct
  misc_feature 1..20: note = spacer sequence
  source 1..20: mol_type = other RNA
aacttatcccttacataccc

SEQ ID NO: 11152 - RNA, 20 nt, synthetic construct
  misc_feature 1..20: note = spacer sequence
  source 1..20: mol_type = other RNA
tgcctccaacttatccctta

SEQ ID NO: 11153 - RNA, 20 nt, synthetic construct
  misc_feature 1..20: note = spacer sequence
  source 1..20: mol_type = other RNA
tcttgcctccaacttatccc

SEQ ID NO: 11154 - RNA, 20 nt, synthetic construct
  misc_feature 1..20: note = spacer sequence
  source 1..20: mol_type = other RNA
cctcttcttgcctccaactt

SEQ ID NO: 11155 - RNA, 20 nt, synthetic construct
  misc_feature 1..20: note = spacer sequence
  source 1..20: mol_type = other RNA
tcacctcttcttgcctccaa

SEQ ID NO: 11156 - RNA, 20 nt, synthetic construct
  misc_feature 1..20: note = spacer sequence
  source 1..20: mol_type = other RNA
cttcacctcttcttgcctcc

SEQ ID NO: 11157 - RNA, 20 nt, synthetic construct
  misc_feature 1..20: note = spacer sequence
  source 1..20: mol_type = other RNA
ctcttcacctcttcttgcct

SEQ ID NO: 11158 - RNA, 20 nt, synthetic construct
  misc_feature 1..20: note = spacer sequence
  source 1..20: mol_type = other RNA
gaagtgatcagctctgtctg

SEQ ID NO: 11159 - RNA, 20 nt, synthetic construct
  misc_feature 1..20: note = spacer sequence
  source 1..20: mol_type = other RNA
gagctctctcttcacctctt

SEQ ID NO: 11160 - RNA, 20 nt, synthetic construct
  misc_feature 1..20: note = spacer sequence
  source 1..20: mol_type = other RNA
cttcagagctctctcttcac

SEQ ID NO: 11161 - RNA, 20 nt, synthetic construct
  misc_feature 1..20: note = spacer sequence
  source 1..20: mol_type = other RNA
gctctgtctggtgcttggag

SEQ ID NO: 11162 - RNA, 20 nt, synthetic construct
  misc_feature 1..20: note = spacer sequence
  source 1..20: mol_type = other RNA
gtctggtgcttggagtagaa

SEQ ID NO: 11163 - RNA, 20 nt, synthetic construct
  misc_feature 1..20: note = spacer sequence
  source 1..20: mol_type = other RNA
ggtgcttggagtagaagtcc

SEQ ID NO: 11164 - RNA, 20 nt, synthetic construct
  misc_feature 1..20: note = spacer sequence
  source 1..20: mol_type = other RNA
aagcaccagacagagctgat

SEQ ID NO: 11165 - RNA, 20 nt, synthetic construct
  misc_feature 1..20: note = spacer sequence
  source 1..20: mol_type = other RNA
actccaagcaccagacagag

SEQ ID NO: 11166 - RNA, 20 nt, synthetic construct
  misc_feature 1..20: note = spacer sequence
  source 1..20: mol_type = other RNA
agcaagataagaattggaaa

SEQ ID NO: 11167 - RNA, 20 nt, synthetic construct
  misc_feature 1..20: note = spacer sequence
  source 1..20: mol_type = other RNA
tgctggacttctactccaag

SEQ ID NO: 11168 - RNA, 20 nt, synthetic construct
  misc_feature 1..20: note = spacer sequence
  source 1..20: mol_type = other RNA
tatcttgctggacttctact

SEQ ID NO: 11169 - RNA, 20 nt, synthetic construct
  misc_feature 1..20: note = spacer sequence
  source 1..20: mol_type = other RNA
aattcttatcttgctggact

SEQ ID NO: 11170 - RNA, 20 nt, synthetic construct
  misc_feature 1..20: note = spacer sequence
  source 1..20: mol_type = other RNA
ggcactttccaattcttatc

SEQ ID NO: 11171 - RNA, 20 nt, synthetic construct
  misc_feature 1..20: note = spacer sequence
  source 1..20: mol_type = other RNA
ctgcatgtagcacccgtcag

SEQ ID NO: 11172 - RNA, 20 nt, synthetic construct
  misc_feature 1..20: note = spacer sequence
  source 1..20: mol_type = other RNA
tgcgtgtaggctggcgtggt

SEQ ID NO: 11173 - RNA, 20 nt, synthetic construct
  misc_feature 1..20: note = spacer sequence
  source 1..20: mol_type = other RNA
ccacgccagcctacacgcag

SEQ ID NO: 11174 - RNA, 20 nt, synthetic construct
  misc_feature 1..20: note = spacer sequence
  source 1..20: mol_type = other RNA
agcttttgccctcaccacgc

SEQ ID NO: 11175 - RNA, 20 nt, synthetic construct
  misc_feature 1..20: note = spacer sequence
  source 1..20: mol_type = other RNA
gtctagcttttgccctcacc

SEQ ID NO: 11176 - RNA, 20 nt, synthetic construct
  misc_feature 1..20: note = spacer sequence
  source 1..20: mol_type = other RNA
aagaggggaaggcaggcagg

SEQ ID NO: 11177 - RNA, 20 nt, synthetic construct
  misc_feature 1..20: note = spacer sequence
  source 1..20: mol_type = other RNA
ttgatacacatcagtctagc

SEQ ID NO: 11178 - RNA, 20 nt, synthetic construct
  misc_feature 1..20: note = spacer sequence
  source 1..20: mol_type = other RNA
cctctttgatacacatcagt

SEQ ID NO: 11179 - RNA, 20 nt, synthetic construct
  misc_feature 1..20: note = spacer sequence
  source 1..20: mol_type = other RNA
tgcctgccttcccctctttg

SEQ ID NO: 11180 - RNA, 20 nt, synthetic construct
  misc_feature 1..20: note = spacer sequence
  source 1..20: mol_type = other RNA
cctgcctgccttcccctctt

SEQ ID NO: 11181 - RNA, 20 nt, synthetic construct
  misc_feature 1..20: note = spacer sequence
  source 1..20: mol_type = other RNA
ataaactttctcctgcctgc

SEQ ID NO: 11182 - RNA, 20 nt, synthetic construct
  misc_feature 1..20: note = spacer sequence
  source 1..20: mol_type = other RNA
cagccaagtttctataaact

SEQ ID NO: 11183 - RNA, 20 nt, synthetic construct
  misc_feature 1..20: note = spacer sequence
  source 1..20: mol_type = other RNA
caacttgccttcacagccaa

SEQ ID NO: 11184 - RNA, 20 nt, synthetic construct
  misc_feature 1..20: note = spacer sequence
  source 1..20: mol_type = other RNA
tcacaacttgccttcacagc

SEQ ID NO: 11185 - RNA, 20 nt, synthetic construct
  misc_feature 1..20: note = spacer sequence
  source 1..20: mol_type = other RNA
gttgtcttcacaacttgcct

SEQ ID NO: 11186 - RNA, 20 nt, synthetic construct
  misc_feature 1..20: note = spacer sequence
  source 1..20: mol_type = other RNA
tgcaggttttttctgttgtc

SEQ ID NO: 11187 - RNA, 20 nt, synthetic construct
  misc_feature 1..20: note = spacer sequence
  source 1..20: mol_type = other RNA
tcctgcaggttttttctgtt

SEQ ID NO: 11188 - RNA, 20 nt, synthetic construct
  misc_feature 1..20: note = spacer sequence
  source 1..20: mol_type = other RNA
cttcctcctgcaggtttttt

SEQ ID NO: 11189 - RNA, 20 nt, synthetic construct
  misc_feature 1..20: note = spacer sequence
  source 1..20: mol_type = other RNA
cacttcctcctgcaggtttt

SEQ ID NO: 11190 - RNA, 20 nt, synthetic construct
  misc_feature 1..20: note = spacer sequence
  source 1..20: mol_type = other RNA
aaacaaaacaacacacaagc

SEQ ID NO: 11191 - RNA, 20 nt, synthetic construct
  misc_feature 1..20: note = spacer sequence
  source 1..20: mol_type = other RNA
caaaacaaaacaacacacaa

SEQ ID NO: 11192 - RNA, 20 nt, synthetic construct
  misc_feature 1..20: note = spacer sequence
  source 1..20: mol_type = other RNA
tctcaaaacaaaacaacaca

SEQ ID NO: 11193 - RNA, 20 nt, synthetic construct
  misc_feature 1..20: note = spacer sequence
  source 1..20: mol_type = other RNA
catctcaaaacaaaacaaca

SEQ ID NO: 11194 - RNA, 20 nt, synthetic construct
  misc_feature 1..20: note = spacer sequence
  source 1..20: mol_type = other RNA
tttttaaaattattttattt

SEQ ID NO: 11195 - RNA, 20 nt, synthetic construct
  misc_feature 1..20: note = spacer sequence
  source 1..20: mol_type = other RNA
tccgcaagaccactaacatt

SEQ ID NO: 11196 - RNA, 20 nt, synthetic construct
  misc_feature 1..20: note = spacer sequence
  source 1..20: mol_type = other RNA
gcaagaccactaacattgca

SEQ ID NO: 11197 - RNA, 20 nt, synthetic construct
  misc_feature 1..20: note = spacer sequence
  source 1..20: mol_type = other RNA
tgcggatgacagctgttaca

SEQ ID NO: 11198 - RNA, 20 nt, synthetic construct
  misc_feature 1..20: note = spacer sequence
  source 1..20: mol_type = other RNA
aatgcaatgttagtggtctt

SEQ ID NO: 11199 - RNA, 20 nt, synthetic construct
  misc_feature 1..20: note = spacer sequence
  source 1..20: mol_type = other RNA
gtactttctaatgcaatgtt

SEQ ID NO: 11200 - RNA, 20 nt, synthetic construct
  misc_feature 1..20: note = spacer sequence
  source 1..20: mol_type = other RNA
tgtctgtactttctaatgca

SEQ ID NO: 11201 - RNA, 20 nt, synthetic construct
  misc_feature 1..20: note = spacer sequence
  source 1..20: mol_type = other RNA
cgcggtggctcatgcctgta

SEQ ID NO: 11202 - RNA, 20 nt, synthetic construct
  misc_feature 1..20: note = spacer sequence
  source 1..20: mol_type = other RNA
tgcctgtaatcccagaattt

SEQ ID NO: 11203 - RNA, 20 nt, synthetic construct
  misc_feature 1..20: note = spacer sequence
  source 1..20: mol_type = other RNA
catctgtacttttttttttt

SEQ ID NO: 11204 - RNA, 20 nt, synthetic construct
  misc_feature 1..20: note = spacer sequence
  source 1..20: mol_type = other RNA
actcacatctgtactttttt

SEQ ID NO: 11205 - RNA, 20 nt, synthetic construct
  misc_feature 1..20: note = spacer sequence
  source 1..20: mol_type = other RNA
ctgtttcctaccctttggca

SEQ ID NO: 11206 - RNA, 20 nt, synthetic construct
  misc_feature 1..20: note = spacer sequence
  source 1..20: mol_type = other RNA
gtttcctaccctttggcatt

SEQ ID NO: 11207 - RNA, 20 nt, synthetic construct
  misc_feature 1..20: note = spacer sequence
  source 1..20: mol_type = other RNA
taccctttggcatttggcat

SEQ ID NO: 11208 - RNA, 20 nt, synthetic construct
  misc_feature 1..20: note = spacer sequence
  source 1..20: mol_type = other RNA
ggagatctactgtctaccaa

SEQ ID NO: 11209 - RNA, 20 nt, synthetic construct
  misc_feature 1..20: note = spacer sequence
  source 1..20: mol_type = other RNA
agaaatgccaaatgccaaat

SEQ ID NO: 11210 - RNA, 20 nt, synthetic construct
  misc_feature 1..20: note = spacer sequence
  source 1..20: mol_type = other RNA
ccagaaatgccaaatgccaa

SEQ ID NO: 11211 - RNA, 20 nt, synthetic construct
  misc_feature 1..20: note = spacer sequence
  source 1..20: mol_type = other RNA
actgtctaccaaattctgtc

SEQ ID NO: 11212 - RNA, 20 nt, synthetic construct
  misc_feature 1..20: note = spacer sequence
  source 1..20: mol_type = other RNA
accaaattctgtccaagatc

SEQ ID NO: 11213 - RNA, 20 nt, synthetic construct
  misc_feature 1..20: note = spacer sequence
  source 1..20: mol_type = other RNA
gtccaagatccccacaccat

SEQ ID NO: 11214 - RNA, 20 nt, synthetic construct
  misc_feature 1..20: note = spacer sequence
  source 1..20: mol_type = other RNA
aagatccccacaccatgttt

SEQ ID NO: 11215 - RNA, 20 nt, synthetic construct
  misc_feature 1..20: note = spacer sequence
  source 1..20: mol_type = other RNA
tggacagaatttggtagaca

SEQ ID NO: 11216 - RNA, 20 nt, synthetic construct
  misc_feature 1..20: note = spacer sequence
  source 1..20: mol_type = other RNA
aaagggggtattttctgtgt

SEQ ID NO: 11217 - RNA, 20 nt, synthetic construct
  misc_feature 1..20: note = spacer sequence
  source 1..20: mol_type = other RNA
gtgtaccatcctactgagat

SEQ ID NO: 11218 - RNA, 20 nt, synthetic construct
  misc_feature 1..20: note = spacer sequence
  source 1..20: mol_type = other RNA
tactgagatttgaatgcaca

SEQ ID NO: 11219 - RNA, 20 nt, synthetic construct
  misc_feature 1..20: note = spacer sequence
  source 1..20: mol_type = other RNA
gtaggatggtacacagaaaa

SEQ ID NO: 11220 - RNA, 20 nt, synthetic construct
  misc_feature 1..20: note = spacer sequence
  source 1..20: mol_type = other RNA
cagtaggatggtacacagaa

SEQ ID NO: 11221 - RNA, 20 nt, synthetic construct
  misc_feature 1..20: note = spacer sequence
  source 1..20: mol_type = other RNA
aatctcagtaggatggtaca

SEQ ID NO: 11222 - RNA, 20 nt, synthetic construct
  misc_feature 1..20: note = spacer sequence
  source 1..20: mol_type = other RNA
tgtgcattcaaatctcagta

SEQ ID NO: 11223 - RNA, 20 nt, synthetic construct
  misc_feature 1..20: note = spacer sequence
  source 1..20: mol_type = other RNA
tgtttcttgtgcattcaaat

SEQ ID NO: 11224 - RNA, 20 nt, synthetic construct
  misc_feature 1..20: note = spacer sequence
  source 1..20: mol_type = other RNA
aagatccatgtgcttgagat

SEQ ID NO: 11225 - RNA, 20 nt, synthetic construct
  misc_feature 1..20: note = spacer sequence
  source 1..20: mol_type = other RNA
tagaagccaaatcttgtttc

SEQ ID NO: 11226 - RNA, 20 nt, synthetic construct
  misc_feature 1..20: note = spacer sequence
  source 1..20: mol_type = other RNA
atgtgcttgagatagttaac

SEQ ID NO: 11227 - RNA, 20 nt, synthetic construct
  misc_feature 1..20: note = spacer sequence
  source 1..20: mol_type = other RNA
gcctggagagataaagatgg

SEQ ID NO: 11228 - RNA, 20 nt, synthetic construct
  misc_feature 1..20: note = spacer sequence
  source 1..20: mol_type = other RNA
tctgcctggagagataaaga

SEQ ID NO: 11229 - RNA, 20 nt, synthetic construct
  misc_feature 1..20: note = spacer sequence
  source 1..20: mol_type = other RNA
aaccttccaataggaaattt

SEQ ID NO: 11230 - RNA, 20 nt, synthetic construct
  misc_feature 1..20: note = spacer sequence
  source 1..20: mol_type = other RNA
actcgtctgcctggagagat

SEQ ID NO: 11231 - RNA, 20 nt, synthetic construct
  misc_feature 1..20: note = spacer sequence
  source 1..20: mol_type = other RNA
aataggaaattttgggtaaa

SEQ ID NO: 11232 - RNA, 20 nt, synthetic construct
  misc_feature 1..20: note = spacer sequence
  source 1..20: mol_type = other RNA
tattggaaggttcgactcgt

SEQ ID NO: 11233 - RNA, 20 nt, synthetic construct
  misc_feature 1..20: note = spacer sequence
  source 1..20: mol_type = other RNA
tttacccaaaatttcctatt

SEQ ID NO: 11234 - RNA, 20 nt, synthetic construct
  misc_feature 1..20: note = spacer sequence
  source 1..20: mol_type = other RNA
taagtttttgtcatttaccc

SEQ ID NO: 11235 - RNA, 20 nt, synthetic construct
  misc_feature 1..20: note = spacer sequence
  source 1..20: mol_type = other RNA
tttgtgagcagactttgaag

SEQ ID NO: 11236 - RNA, 20 nt, synthetic construct
  misc_feature 1..20: note = spacer sequence
  source 1..20: mol_type = other RNA
caaaggacaaccctcataag

SEQ ID NO: 11237 - RNA, 20 nt, synthetic construct
  misc_feature 1..20: note = spacer sequence
  source 1..20: mol_type = other RNA
gctcacaaaggacaaccctc

SEQ ID NO: 11238 - RNA, 20 nt, synthetic construct
  misc_feature 1..20: note = spacer sequence
  source 1..20: mol_type = other RNA
ggccatcttttcaataggct

SEQ ID NO: 11239 - RNA, 20 nt, synthetic construct
  misc_feature 1..20: note = spacer sequence
  source 1..20: mol_type = other RNA
gaaataagcgtgacggataa

SEQ ID NO: 11240 - RNA, 20 nt, synthetic construct
  misc_feature 1..20: note = spacer sequence
  source 1..20: mol_type = other RNA
gaacctctggccatcttttc

SEQ ID NO: 11241 - RNA, 20 nt, synthetic construct
  misc_feature 1..20: note = spacer sequence
  source 1..20: mol_type = other RNA
cgcttatttctgaacctctg

SEQ ID NO: 11242 - RNA, 20 nt, synthetic construct
  misc_feature 1..20: note = spacer sequence
  source 1..20: mol_type = other RNA
gtcacgcttatttctgaacc

SEQ ID NO: 11243 - RNA, 20 nt, synthetic construct
  misc_feature 1..20: note = spacer sequence
  source 1..20: mol_type = other RNA
gcaagacatttaatacatct

SEQ ID NO: 11244 - RNA, 20 nt, synthetic construct
  misc_feature 1..20: note = spacer sequence
  source 1..20: mol_type = other RNA
tgctgatttttatccgtcac

SEQ ID NO: 11245 - RNA, 20 nt, synthetic construct
  misc_feature 1..20: note = spacer sequence
  source 1..20: mol_type = other RNA
gcaaacttgccttctttcaa

SEQ ID NO: 11246 - RNA, 20 nt, synthetic construct
  misc_feature 1..20: note = spacer sequence
  source 1..20: mol_type = other RNA
ttcaaagaacattgattgaa

SEQ ID NO: 11247 - RNA, 20 nt, synthetic construct
  misc_feature 1..20: note = spacer sequence
  source 1..20: mol_type = other RNA
aagaacattgattgaaacag

SEQ ID NO: 11248 - RNA, 20 nt, synthetic construct
  misc_feature 1..20: note = spacer sequence
  source 1..20: mol_type = other RNA
atcaatgttctttgaaagaa

SEQ ID NO: 11249 - RNA, 20 nt, synthetic construct
  misc_feature 1..20: note = spacer sequence
  source 1..20: mol_type = other RNA
gtttcaatcaatgttctttg

SEQ ID NO: 11250 - RNA, 20 nt, synthetic construct
  misc_feature 1..20: note = spacer sequence
  source 1..20: mol_type = other RNA
tttgttcataatgtgggtgt

SEQ ID NO: 11251 - RNA, 20 nt, synthetic construct
  misc_feature 1..20: note = spacer sequence
  source 1..20: mol_type = other RNA
taatgtgggtgtgaaaatag

SEQ ID NO: 11252 - RNA, 20 nt, synthetic construct
  misc_feature 1..20: note = spacer sequence
  source 1..20: mol_type = other RNA
cacccacattatgaacaaac

SEQ ID NO: 11253 - RNA, 20 nt, synthetic construct
  misc_feature 1..20: note = spacer sequence
  source 1..20: mol_type = other RNA
gaaaagccattctaaacaaa

SEQ ID NO: 11254 - RNA, 20 nt, synthetic construct
  misc_feature 1..20: note = spacer sequence
  source 1..20: mol_type = other RNA
gaactattttcacacccaca

SEQ ID NO: 11255 - RNA, 20 nt, synthetic construct
  misc_feature 1..20: note = spacer sequence
  source 1..20: mol_type = other RNA
aaacaaacttatgtttttaa

SEQ ID NO: 11256 - RNA, 20 nt, synthetic construct
  misc_feature 1..20: note = spacer sequence
  source 1..20: mol_type = other RNA
tttccttcctccgcaaacag

SEQ ID NO: 11257 - RNA, 20 nt, synthetic construct
  misc_feature 1..20: note = spacer sequence
  source 1..20: mol_type = other RNA
tcttttccttcctccgcaaa

SEQ ID NO: 11258 - RNA, 20 nt, synthetic construct
  misc_feature 1..20: note = spacer sequence
  source 1..20: mol_type = other RNA
ggaagcaatgttctggttaa

SEQ ID NO: 11259 - RNA, 20 nt, synthetic construct
  misc_feature 1..20: note = spacer sequence
  source 1..20: mol_type = other RNA
tgaatgtcatcttttccttc

SEQ ID NO: 11260 - RNA, 20 nt, synthetic construct
  misc_feature 1..20: note = spacer sequence
  source 1..20: mol_type = other RNA
ggttaattctgtgttcttca

SEQ ID NO: 11261 - RNA, 20 nt, synthetic construct
  misc_feature 1..20: note = spacer sequence
  source 1..20: mol_type = other RNA
gtgttcttcaaaagccagct

SEQ ID NO: 11262 - RNA, 20 nt, synthetic construct
  misc_feature 1..20: note = spacer sequence
  source 1..20: mol_type = other RNA
tcaaaagccagctcattttc

SEQ ID NO: 11263 - RNA, 20 nt, synthetic construct
  misc_feature 1..20: note = spacer sequence
  source 1..20: mol_type = other RNA
aaagccagctcattttcttg

SEQ ID NO: 11264 - RNA, 20 nt, synthetic construct
  misc_feature 1..20: note = spacer sequence
  source 1..20: mol_type = other RNA
ttttcttgaaaagaatgctg

SEQ ID NO: 11265 - RNA, 20 nt, synthetic construct
  misc_feature 1..20: note = spacer sequence
  source 1..20: mol_type = other RNA
tgaaaagaatgctggccaca

SEQ ID NO: 11266 - RNA, 20 nt, synthetic construct
  misc_feature 1..20: note = spacer sequence
  source 1..20: mol_type = other RNA
agaaaatgagctggcttttg

SEQ ID NO: 11267 - RNA, 20 nt, synthetic construct
  misc_feature 1..20: note = spacer sequence
  source 1..20: mol_type = other RNA
tttcaagaaaatgagctggc

SEQ ID NO: 11268 - RNA, 20 nt, synthetic construct
  misc_feature 1..20: note = spacer sequence
  source 1..20: mol_type = other RNA
acaggtatagagaatatgga

SEQ ID NO: 11269 - RNA, 20 nt, synthetic construct
  misc_feature 1..20: note = spacer sequence
  source 1..20: mol_type = other RNA
atacctgtggattgtggcca

SEQ ID NO: 11270 - RNA, 20 nt, synthetic construct
  misc_feature 1..20: note = spacer sequence
  source 1..20: mol_type = other RNA
ctatacctgtggattgtggc

SEQ ID NO: 11271 - RNA, 20 nt, synthetic construct
  misc_feature 1..20: note = spacer sequence
  source 1..20: mol_type = other RNA
atattctctatacctgtgga

SEQ ID NO: 11272 - RNA, 20 nt, synthetic construct
  misc_feature 1..20: note = spacer sequence
  source 1..20: mol_type = other RNA
ccatattctctatacctgtg

SEQ ID NO: 11273 - RNA, 20 nt, synthetic construct
  misc_feature 1..20: note = spacer sequence
  source 1..20: mol_type = other RNA
ctccatattctctatacctg

SEQ ID NO: 11274 - RNA, 20 nt, synthetic construct
  misc_feature 1..20: note = spacer sequence
  source 1..20: mol_type = other RNA
cacgcctgaagagtccaata

SEQ ID NO: 11275 - RNA, 20 nt, synthetic construct
  misc_feature 1..20: note = spacer sequence
  source 1..20: mol_type = other RNA
cgcctgaagagtccaataaa

SEQ ID NO: 11276 - RNA, 20 nt, synthetic construct
  misc_feature 1..20: note = spacer sequence
  source 1..20: mol_type = other RNA
ggcgtgagatgctttctctc

SEQ ID NO: 11277 - RNA, 20 nt, synthetic construct
  misc_feature 1..20: note = spacer sequence
  source 1..20: mol_type = other RNA
tcaggcgtgagatgctttct

SEQ ID NO: 11278 - RNA, 20 nt, synthetic construct
  misc_feature 1..20: note = spacer sequence
  source 1..20: mol_type = other RNA
aataaaacatttatagataa

SEQ ID NO: 11279 - RNA, 20 nt, synthetic construct
  misc_feature 1..20: note = spacer sequence
  source 1..20: mol_type = other RNA
ataaatgttttattggactc

SEQ ID NO: 11280 - RNA, 20 nt, synthetic construct
  misc_feature 1..20: note = spacer sequence
  source 1..20: mol_type = other RNA
tatctataaatgttttattg

SEQ ID NO: 11281 - RNA, 20 nt, synthetic construct
  misc_feature 1..20: note = spacer sequence
  source 1..20: mol_type = other RNA
taaattcttatctataaatg

SEQ ID NO: 11282 - RNA, 20 nt, synthetic construct
  misc_feature 1..20: note = spacer sequence
  source 1..20: mol_type = other RNA
cttaaattcttatctataaa

SEQ ID NO: 11283 - RNA, 20 nt, synthetic construct
  misc_feature 1..20: note = spacer sequence
  source 1..20: mol_type = other RNA
ttctgttttttgtttgtttg

SEQ ID NO: 11284 - RNA, 20 nt, synthetic construct
  misc_feature 1..20: note = spacer sequence
  source 1..20: mol_type = other RNA
gttttttgtttgtttgtttg

SEQ ID NO: 11285 - RNA, 20 nt, synthetic construct
  misc_feature 1..20: note = spacer sequence
  source 1..20: mol_type = other RNA
ccctgtgttgcccaggctgg

SEQ ID NO: 11286 - RNA, 20 nt, synthetic construct
  misc_feature 1..20: note = spacer sequence
  source 1..20: mol_type = other RNA
ctgtgttgcccaggctggtc

SEQ ID NO: 11287 - RNA, 20 nt, synthetic construct
  misc_feature 1..20: note = spacer sequence
  source 1..20: mol_type = other RNA
tgaactcctgggctcaggca

SEQ ID NO: 11288 - RNA, 20 nt, synthetic construct
  misc_feature 1..20: note = spacer sequence
  source 1..20: mol_type = other RNA
agaccagcctgggcaacaca

SEQ ID NO: 11289 - RNA, 20 nt, synthetic construct
  misc_feature 1..20: note = spacer sequence
  source 1..20: mol_type = other RNA
tgggctcaggcaattcttcc

SEQ ID NO: 11290 - RNA, 20 nt, synthetic construct
  misc_feature 1..20: note = spacer sequence
  source 1..20: mol_type = other RNA
ggcaattcttccatctcagc

SEQ ID NO: 11291 - RNA, 20 nt, synthetic construct
  misc_feature 1..20: note = spacer sequence
  source 1..20: mol_type = other RNA
tccatctcagcctcgcagag

SEQ ID NO: 11292 - RNA, 20 nt, synthetic construct
  misc_feature 1..20: note = spacer sequence
  source 1..20: mol_type = other RNA
atctcagcctcgcagagttc

SEQ ID NO: 11293 - RNA, 20 nt, synthetic construct
  misc_feature 1..20: note = spacer sequence
  source 1..20: mol_type = other RNA
cagcctcgcagagttctagg

SEQ ID NO: 11294 - RNA, 20 nt, synthetic construct
  misc_feature 1..20: note = spacer sequence
  source 1..20: mol_type = other RNA
gcctcgcagagttctaggat

SEQ ID NO: 11295 - RNA, 20 nt, synthetic construct
  misc_feature 1..20: note = spacer sequence
  source 1..20: mol_type = other RNA
cagagttctaggattacagg

SEQ ID NO: 11296 - RNA, 20 nt, synthetic construct
  misc_feature 1..20: note = spacer sequence
  source 1..20: mol_type = other RNA
gcgaggctgagatggaagaa

SEQ ID NO: 11297 - RNA, 20 nt, synthetic construct
  misc_feature 1..20: note = spacer sequence
  source 1..20: mol_type = other RNA
aggattacaggcatgagcca

SEQ ID NO: 11298 - RNA, 20 nt, synthetic construct
  misc_feature 1..20: note = spacer sequence
  source 1..20: mol_type = other RNA
tagaactctgcgaggctgag

SEQ ID NO: 11299 - RNA, 20 nt, synthetic construct
  misc_feature 1..20: note = spacer sequence
  source 1..20: mol_type = other RNA
tgcctgtaatcctagaactc

SEQ ID NO: 11300 - RNA, 20 nt, synthetic construct
  misc_feature 1..20: note = spacer sequence
  source 1..20: mol_type = other RNA
acaaacaaatttaaaattag

SEQ ID NO: 11301 - RNA, 20 nt, synthetic construct
  misc_feature 1..20: note = spacer sequence
  source 1..20: mol_type = other RNA
tcctatgttgtccaggctgg

SEQ ID NO: 11302 - RNA, 20 nt, synthetic construct
  misc_feature 1..20: note = spacer sequence
  source 1..20: mol_type = other RNA
tatgttgtccaggctggtct

SEQ ID NO: 11303 - RNA, 20 nt, synthetic construct
  misc_feature 1..20: note = spacer sequence
  source 1..20: mol_type = other RNA
aggctggtcttcaactcctg

SEQ ID NO: 11304 - RNA, 20 nt, synthetic construct
  misc_feature 1..20: note = spacer sequence
  source 1..20: mol_type = other RNA
tcaactcctgttcttaagca

SEQ ID NO: 11305 - RNA, 20 nt, synthetic construct
  misc_feature 1..20: note = spacer sequence
  source 1..20: mol_type = other RNA
actcctgttcttaagcaatc

SEQ ID NO: 11306 - RNA, 20 nt, synthetic construct
  misc_feature 1..20: note = spacer sequence
  source 1..20: mol_type = other RNA
tgttcttaagcaatcctcct

SEQ ID NO: 11307 - RNA, 20 nt, synthetic construct
  misc_feature 1..20: note = spacer sequence
  source 1..20: mol_type = other RNA
taagcaatcctcctgcctcg

SEQ ID NO: 11308 - RNA, 20 nt, synthetic construct
  misc_feature 1..20: note = spacer sequence
  source 1..20: mol_type = other RNA
tcctgcctcggcctcccaaa

SEQ ID NO: 11309 - RNA, 20 nt, synthetic construct
  misc_feature 1..20: note = spacer sequence
  source 1..20: mol_type = other RNA
tgcctcggcctcccaaagtg

SEQ ID NO: 11310 - RNA, 20 nt, synthetic construct
  misc_feature 1..20: note = spacer sequence
  source 1..20: mol_type = other RNA
gcctcccaaagtgttgggaa

SEQ ID NO: 11311 - RNA, 20 nt, synthetic construct
  misc_feature 1..20: note = spacer sequence
  source 1..20: mol_type = other RNA
caaagtgttgggaatatggg

SEQ ID NO: 11312 - RNA, 20 nt, synthetic construct
  misc_feature 1..20: note = spacer sequence
  source 1..20: mol_type = other RNA
caacactttgggaggccgag

SEQ ID NO: 11313 - RNA, 20 nt, synthetic construct
  misc_feature 1..20: note = spacer sequence
  source 1..20: mol_type = other RNA
cacccatattcccaacactt

SEQ ID NO: 11314 - RNA, 20 nt, synthetic construct
  misc_feature 1..20: note = spacer sequence
  source 1..20: mol_type = other RNA
tattcccacccatattccca

SEQ ID NO: 11315 - RNA, 20 nt, synthetic construct
  misc_feature 1..20: note = spacer sequence
  source 1..20: mol_type = other RNA
aggctgggtgcagtggctca

SEQ ID NO: 11316 - RNA, 20 nt, synthetic construct
  misc_feature 1..20: note = spacer sequence
  source 1..20: mol_type = other RNA
ttttcaaggctgggtgcagt

SEQ ID NO: 11317 - RNA, 20 nt, synthetic construct
  misc_feature 1..20: note = spacer sequence
  source 1..20: mol_type = other RNA
ttctaatgctttatgccata

SEQ ID NO: 11318 - RNA, 20 nt, synthetic construct
  misc_feature 1..20: note = spacer sequence
  source 1..20: mol_type = other RNA
aatgctttatgccatatact

SEQ ID NO: 11319 - RNA, 20 nt, synthetic construct
  misc_feature 1..20: note = spacer sequence
  source 1..20: mol_type = other RNA
ccagaaagtatatggcataa

SEQ ID NO: 11320 - RNA, 20 nt, synthetic construct
  misc_feature 1..20: note = spacer sequence
  source 1..20: mol_type = other RNA
ctccagaaagtatatggcat

SEQ ID NO: 11321 - RNA, 20 nt, synthetic construct
  misc_feature 1..20: note = spacer sequence
  source 1..20: mol_type = other RNA
tataatacagccagtttata

SEQ ID NO: 11322 - RNA, 20 nt, synthetic construct
  misc_feature 1..20: note = spacer sequence
  source 1..20: mol_type = other RNA
catataatacagccagttta

SEQ ID NO: 11323 - RNA, 20 nt, synthetic construct
  misc_feature 1..20: note = spacer sequence
  source 1..20: mol_type = other RNA
ttctccttggtctgctttcc

SEQ ID NO: 11324 - RNA, 20 nt, synthetic construct
  misc_feature 1..20: note = spacer sequence
  source 1..20: mol_type = other RNA
ccttggtctgctttccttct

SEQ ID NO: 11325 - RNA, 20 nt, synthetic construct
  misc_feature 1..20: note = spacer sequence
  source 1..20: mol_type = other RNA
ttggtctgctttccttctct

SEQ ID NO: 11326 - RNA, 20 nt, synthetic construct
  misc_feature 1..20: note = spacer sequence
  source 1..20: mol_type = other RNA
gctttccttctctggccagc

SEQ ID NO: 11327 - RNA, 20 nt, synthetic construct
  misc_feature 1..20: note = spacer sequence
  source 1..20: mol_type = other RNA
ttctctggccagcctcctgg

SEQ ID NO: 11328 - RNA, 20 nt, synthetic construct
  misc_feature 1..20: note = spacer sequence
  source 1..20: mol_type = other RNA
ctggccagcctcctggattc

SEQ ID NO: 11329 - RNA, 20 nt, synthetic construct
  misc_feature 1..20: note = spacer sequence
  source 1..20: mol_type = other RNA
ggccagcctcctggattcaa

SEQ ID NO: 11330 - RNA, 20 nt, synthetic construct
  misc_feature 1..20: note = spacer sequence
  source 1..20: mol_type = other RNA
tggattcaagtcatttgtca

SEQ ID NO: 11331 - RNA, 20 nt, synthetic construct
  misc_feature 1..20: note = spacer sequence
  source 1..20: mol_type = other RNA
aggaggctggccagagaagg

SEQ ID NO: 11332 - RNA, 20 nt, synthetic construct
  misc_feature 1..20: note = spacer sequence
  source 1..20: mol_type = other RNA
agtcatttgtcagatatgtg

SEQ ID NO: 11333 - RNA, 20 nt, synthetic construct
  misc_feature 1..20: note = spacer sequence
  source 1..20: mol_type = other RNA
cctggtttagaactgcattt

SEQ ID NO: 11334 - RNA, 20 nt, synthetic construct
  misc_feature 1..20: note = spacer sequence
  source 1..20: mol_type = other RNA
tggtttagaactgcatttca

SEQ ID NO: 11335 - RNA, 20 nt, synthetic construct
  misc_feature 1..20: note = spacer sequence
  source 1..20: mol_type = other RNA
aaaccaggagagagttcagt

SEQ ID NO: 11336 - RNA, 20 nt, synthetic construct
  misc_feature 1..20: note = spacer sequence
  source 1..20: mol_type = other RNA
actgcccactggggaattcc

SEQ ID NO: 11337 - RNA, 20 nt, synthetic construct
  misc_feature 1..20: note = spacer sequence
  source 1..20: mol_type = other RNA
ccagtgggcagttgaaatgc

SEQ ID NO: 11338 - RNA, 20 nt, synthetic construct
  misc_feature 1..20: note = spacer sequence
  source 1..20: mol_type = other RNA
acatggggatccctccatcc

SEQ ID NO: 11339 - RNA, 20 nt, synthetic construct
  misc_feature 1..20: note = spacer sequence
  source 1..20: mol_type = other RNA
ccatgtggaattccccagtg

SEQ ID NO: 11340 - RNA, 20 nt, synthetic construct
  misc_feature 1..20: note = spacer sequence
  source 1..20: mol_type = other RNA
ctccatccccaagggaccca

SEQ ID NO: 11341 - RNA, 20 nt, synthetic construct
  misc_feature 1..20: note = spacer sequence
  source 1..20: mol_type = other RNA
atccccaagggacccacctg

SEQ ID NO: 11342 - RNA, 20 nt, synthetic construct
  misc_feature 1..20: note = spacer sequence
  source 1..20: mol_type = other RNA
ccaagggacccacctgactc

SEQ ID NO: 11343 - RNA, 20 nt, synthetic construct
  misc_feature 1..20: note = spacer sequence
  source 1..20: mol_type = other RNA
cttggggatggagggatccc

SEQ ID NO: 11344 - RNA, 20 nt, synthetic construct
  misc_feature 1..20: note = spacer sequence
  source 1..20: mol_type = other RNA
ggtgggtcccttggggatgg

SEQ ID NO: 11345 - RNA, 20 nt, synthetic construct
  misc_feature 1..20: note = spacer sequence
  source 1..20: mol_type = other RNA
ttttgtgcatcttctgtctt

SEQ ID NO: 11346 - RNA, 20 nt, synthetic construct
  misc_feature 1..20: note = spacer sequence
  source 1..20: mol_type = other RNA
tctgtcttcatgccctttat

SEQ ID NO: 11347 - RNA, 20 nt, synthetic construct
  misc_feature 1..20: note = spacer sequence
  source 1..20: mol_type = other RNA
gtcttcatgccctttatgtt

SEQ ID NO: 11348 - RNA, 20 nt, synthetic construct
  misc_feature 1..20: note = spacer sequence
  source 1..20: mol_type = other RNA
tcatgccctttatgttgttg

SEQ ID NO: 11349 - RNA, 20 nt, synthetic construct
  misc_feature 1..20: note = spacer sequence
  source 1..20: mol_type = other RNA
tgccctttatgttgttgggg

SEQ ID NO: 11350 - RNA, 20 nt, synthetic construct
  misc_feature 1..20: note = spacer sequence
  source 1..20: mol_type = other RNA
attgttttggccccaacaac

SEQ ID NO: 11351 - RNA, 20 nt, synthetic construct
  misc_feature 1..20: note = spacer sequence
  source 1..20: mol_type = other RNA
ttccattgttttggccccaa

SEQ ID NO: 11352 - RNA, 20 nt, synthetic construct
  misc_feature 1..20: note = spacer sequence
  source 1..20: mol_type = other RNA
aagaaggaagagctcaacgg

SEQ ID NO: 11353 - RNA, 20 nt, synthetic construct
  misc_feature 1..20: note = spacer sequence
  source 1..20: mol_type = other RNA
tggagttcctgctttccaca

SEQ ID NO: 11354 - RNA, 20 nt, synthetic construct
  misc_feature 1..20: note = spacer sequence
  source 1..20: mol_type = other RNA
ttcttggagttcctgctttc

SEQ ID NO: 11355 - RNA, 20 nt, synthetic construct
  misc_feature 1..20: note = spacer sequence
  source 1..20: mol_type = other RNA
tccttcttggagttcctgct

SEQ ID NO: 11356 - RNA, 20 nt, synthetic construct
  misc_feature 1..20: note = spacer sequence
  source 1..20: mol_type = other RNA
acggcagttgggcaatggga

SEQ ID NO: 11357 - RNA, 20 nt, synthetic construct
  misc_feature 1..20: note = spacer sequence
  source 1..20: mol_type = other RNA
cattgcccaactgccgttga

SEQ ID NO: 11358 - RNA, 20 nt, synthetic construct
  misc_feature 1..20: note = spacer sequence
  source 1..20: mol_type = other RNA
ctaaaatcccattgcccaac

SEQ ID NO: 11359 - RNA, 20 nt, synthetic construct
  misc_feature 1..20: note = spacer sequence
  source 1..20: mol_type = other RNA
ttttctttttaatttttcag

SEQ ID NO: 11360 - RNA, 20 nt, synthetic construct
  misc_feature 1..20: note = spacer sequence
  source 1..20: mol_type = other RNA
ttttaatttttcagcatttt

SEQ ID NO: 11361 - RNA, 20 nt, synthetic construct
  misc_feature 1..20: note = spacer sequence
  source 1..20: mol_type = other RNA
gcatttttcatactcctcac

SEQ ID NO: 11362 - RNA, 20 nt, synthetic construct
  misc_feature 1..20: note = spacer sequence
  source 1..20: mol_type = other RNA
tactcctcacagaaggcatg

SEQ ID NO: 11363 - RNA, 20 nt, synthetic construct
  misc_feature 1..20: note = spacer sequence
  source 1..20: mol_type = other RNA
tcacagaaggcatgtatcac

SEQ ID NO: 11364 - RNA, 20 nt, synthetic construct
  misc_feature 1..20: note = spacer sequence
  source 1..20: mol_type = other RNA
cagaaggcatgtatcacttt

SEQ ID NO: 11365 - RNA, 20 nt, synthetic construct
  misc_feature 1..20: note = spacer sequence
  source 1..20: mol_type = other RNA
cttcatcacttcctatctta

SEQ ID NO: 11366 - RNA, 20 nt, synthetic construct
  misc_feature 1..20: note = spacer sequence
  source 1..20: mol_type = other RNA
tcatcacttcctatcttact

SEQ ID NO: 11367 - RNA, 20 nt, synthetic construct
  misc_feature 1..20: note = spacer sequence
  source 1..20: mol_type = other RNA
tcacttcctatcttacttag

SEQ ID NO: 11368 - RNA, 20 nt, synthetic construct
  misc_feature 1..20: note = spacer sequence
  source 1..20: mol_type = other RNA
cttcctatcttacttaggat

SEQ ID NO: 11369 - RNA, 20 nt, synthetic construct
  misc_feature 1..20: note = spacer sequence
  source 1..20: mol_type = other RNA
tatcttacttaggattagga

SEQ ID NO: 11370 - RNA, 20 nt, synthetic construct
  misc_feature 1..20: note = spacer sequence
  source 1..20: mol_type = other RNA
tacttaggattaggaatcca

SEQ ID NO: 11371 - RNA, 20 nt, synthetic construct
  misc_feature 1..20: note = spacer sequence
  source 1..20: mol_type = other RNA
taagtaagataggaagtgat

SEQ ID NO: 11372 - RNA, 20 nt, synthetic construct
  misc_feature 1..20: note = spacer sequence
  source 1..20: mol_type = other RNA
taatcctaagtaagatagga

SEQ ID NO: 11373 - RNA, 20 nt, synthetic construct
  misc_feature 1..20: note = spacer sequence
  source 1..20: mol_type = other RNA
aagattctctttccaaaatg

SEQ ID NO: 11374 - RNA, 20 nt, synthetic construct
  misc_feature 1..20: note = spacer sequence
  source 1..20: mol_type = other RNA
tggattcctaatcctaagta

SEQ ID NO: 11375 - RNA, 20 nt, synthetic construct
  misc_feature 1..20: note = spacer sequence
  source 1..20: mol_type = other RNA
ctttccaaaatggaaagtat

SEQ ID NO: 11376 - RNA, 20 nt, synthetic construct
  misc_feature 1..20: note = spacer sequence
  source 1..20: mol_type = other RNA
ttccaaaatggaaagtatta

SEQ ID NO: 11377 - RNA, 20 nt, synthetic construct
  misc_feature 1..20: note = spacer sequence
  source 1..20: mol_type = other RNA
aaaatggaaagtattaaaaa

SEQ ID NO: 11378 - RNA, 20 nt, synthetic construct
  misc_feature 1..20: note = spacer sequence
  source 1..20: mol_type = other RNA
attttggaaagagaatcttg

SEQ ID NO: 11379 - RNA, 20 nt, synthetic construct
  misc_feature 1..20: note = spacer sequence
  source 1..20: mol_type = other RNA
acacacctagcacagtgcct

SEQ ID NO: 11380 - RNA, 20 nt, synthetic construct
  misc_feature 1..20: note = spacer sequence
  source 1..20: mol_type = other RNA
cagtattccacacacctagc

SEQ ID NO: 11381 - RNA, 20 nt, synthetic construct
  misc_feature 1..20: note = spacer sequence
  source 1..20: mol_type = other RNA
gtgtttgggcttatcacagt

SEQ ID NO: 11382 - RNA, 20 nt, synthetic construct
  misc_feature 1..20: note = spacer sequence
  source 1..20: mol_type = other RNA
ttcctcgaggaactattcct

SEQ ID NO: 11383 - RNA, 20 nt, synthetic construct
  misc_feature 1..20: note = spacer sequence
  source 1..20: mol_type = other RNA
tcgaggaactattcctccag

SEQ ID NO: 11384 - RNA, 20 nt, synthetic construct
  misc_feature 1..20: note = spacer sequence
  source 1..20: mol_type = other RNA
aggaactattcctccagagt

SEQ ID NO: 11385 - RNA, 20 nt, synthetic construct
  misc_feature 1..20: note = spacer sequence
  source 1..20: mol_type = other RNA
aggaaggaacttatctgtgt

SEQ ID NO: 11386 - RNA, 20 nt, synthetic construct
  misc_feature 1..20: note = spacer sequence
  source 1..20: mol_type = other RNA
tcgaggaaggaacttatctg

SEQ ID NO: 11387 - RNA, 20 nt, synthetic construct
  misc_feature 1..20: note = spacer sequence
  source 1..20: mol_type = other RNA
tccagagtctggcaccttgc

SEQ ID NO: 11388 - RNA, 20 nt, synthetic construct
  misc_feature 1..20: note = spacer sequence
  source 1..20: mol_type = other RNA
gatatgtgtgttgtaaacat

SEQ ID NO: 11389 - RNA, 20 nt, synthetic construct
  misc_feature 1..20: note = spacer sequence
  source 1..20: mol_type = other RNA
gacaaaggactcatatcatt

SEQ ID NO: 11390 - RNA, 20 nt, synthetic construct
  misc_feature 1..20: note = spacer sequence
  source 1..20: mol_type = other RNA
tcacagtctgtggctttcct

SEQ ID NO: 11391 - RNA, 20 nt, synthetic construct
  misc_feature 1..20: note = spacer sequence
  source 1..20: mol_type = other RNA
cagtctgtggctttcctttt

SEQ ID NO: 11392 - RNA, 20 nt, synthetic construct
  misc_feature 1..20: note = spacer sequence
  source 1..20: mol_type = other RNA
gtggctttccttttcatttt

SEQ ID NO: 11393 - RNA, 20 nt, synthetic construct
  misc_feature 1..20: note = spacer sequence
  source 1..20: mol_type = other RNA
ttttcattttcttttgaaaa

SEQ ID NO: 11394 - RNA, 20 nt, synthetic construct
  misc_feature 1..20: note = spacer sequence
  source 1..20: mol_type = other RNA
ttttcttttgaaaagcagat

SEQ ID NO: 11395 - RNA, 20 nt, synthetic construct
  misc_feature 1..20: note = spacer sequence
  source 1..20: mol_type = other RNA
tttgaaaagcagatgttttt

SEQ ID NO: 11396 - RNA, 20 nt, synthetic construct
  misc_feature 1..20: note = spacer sequence
  source 1..20: mol_type = other RNA
aaagaaaatgaaaaggaaag

SEQ ID NO: 11397 - RNA, 20 nt, synthetic construct
  misc_feature 1..20: note = spacer sequence
  source 1..20: mol_type = other RNA
gcttttcaaaagaaaatgaa

SEQ ID NO: 11398 - RNA, 20 nt, synthetic construct
  misc_feature 1..20: note = spacer sequence
  source 1..20: mol_type = other RNA
aaattaaaaacatctgcttt

SEQ ID NO: 11399 - RNA, 20 nt, synthetic construct
  misc_feature 1..20: note = spacer sequence
  source 1..20: mol_type = other RNA
atcaaaattaaaaacatctg

SEQ ID NO: 11400 - RNA, 20 nt, synthetic construct
  misc_feature 1..20: note = spacer sequence
  source 1..20: mol_type = other RNA
tttatggtttgtgcttttct

SEQ ID NO: 11401 - RNA, 20 nt, synthetic construct
  misc_feature 1..20: note = spacer sequence
  source 1..20: mol_type = other RNA
gtcatattgaaaaatttttg

SEQ ID NO: 11402 - RNA, 20 nt, synthetic construct
  misc_feature 1..20: note = spacer sequence
  source 1..20: mol_type = other RNA
tattgaaaaatttttgctta

SEQ ID NO: 11403 - RNA, 20 nt, synthetic construct
  misc_feature 1..20: note = spacer sequence
  source 1..20: mol_type = other RNA
atatgacagaaaagcacaaa

SEQ ID NO: 11404 - RNA, 20 nt, synthetic construct
  misc_feature 1..20: note = spacer sequence
  source 1..20: mol_type = other RNA
ccaggatatggaaatgttct

SEQ ID NO: 11405 - RNA, 20 nt, synthetic construct
  misc_feature 1..20: note = spacer sequence
  source 1..20: mol_type = other RNA
tggggataagcaaaaatttt

SEQ ID NO: 11406 - RNA, 20 nt, synthetic construct
  misc_feature 1..20: note = spacer sequence
  source 1..20: mol_type = other RNA
atatcctggggataagcaaa

SEQ ID NO: 11407 - RNA, 20 nt, synthetic construct
  misc_feature 1..20: note = spacer sequence
  source 1..20: mol_type = other RNA
cctctattttcttcttgact

SEQ ID NO: 11408 - RNA, 20 nt, synthetic construct
  misc_feature 1..20: note = spacer sequence
  source 1..20: mol_type = other RNA
tctattttcttcttgactct

SEQ ID NO: 11409 - RNA, 20 nt, synthetic construct
  misc_feature 1..20: note = spacer sequence
  source 1..20: mol_type = other RNA
attttcttcttgactcttta

SEQ ID NO: 11410 - RNA, 20 nt, synthetic construct
  misc_feature 1..20: note = spacer sequence
  source 1..20: mol_type = other RNA
tcttgactctttatagctta

SEQ ID NO: 11411 - RNA, 20 nt, synthetic construct
  misc_feature 1..20: note = spacer sequence
  source 1..20: mol_type = other RNA
tgactctttatagcttagca

SEQ ID NO: 11412 - RNA, 20 nt, synthetic construct
  misc_feature 1..20: note = spacer sequence
  source 1..20: mol_type = other RNA
agaagaaaatagaggagaac

SEQ ID NO: 11413 - RNA, 20 nt, synthetic construct
  misc_feature 1..20: note = spacer sequence
  source 1..20: mol_type = other RNA
ttatagcttagcacttttgt

SEQ ID NO: 11414 - RNA, 20 nt, synthetic construct
  misc_feature 1..20: note = spacer sequence
  source 1..20: mol_type = other RNA
gtgatccattttgatttaat

SEQ ID NO: 11415 - RNA, 20 nt, synthetic construct
  misc_feature 1..20: note = spacer sequence
  source 1..20: mol_type = other RNA
cagacttaaacaaaagtgct

SEQ ID NO: 11416 - RNA, 20 nt, synthetic construct
  misc_feature 1..20: note = spacer sequence
  source 1..20: mol_type = other RNA
agcttcatttttttacatta

SEQ ID NO: 11417 - RNA, 20 nt, synthetic construct
  misc_feature 1..20: note = spacer sequence
  source 1..20: mol_type = other RNA
tttttttacattaggatatc

SEQ ID NO: 11418 - RNA, 20 nt, synthetic construct
  misc_feature 1..20: note = spacer sequence
  source 1..20: mol_type = other RNA
taatgtaaaaaaatgaagct

SEQ ID NO: 11419 - RNA, 20 nt, synthetic construct
  misc_feature 1..20: note = spacer sequence
  source 1..20: mol_type = other RNA
agttgttccagcactatttg

SEQ ID NO: 11420 - RNA, 20 nt, synthetic construct
  misc_feature 1..20: note = spacer sequence
  source 1..20: mol_type = other RNA
agcactatttgttggaaaaa

SEQ ID NO: 11421 - RNA, 20 nt, synthetic construct
  misc_feature 1..20: note = spacer sequence
  source 1..20: mol_type = other RNA
aacaaatagtgctggaacaa

SEQ ID NO: 11422 - RNA, 20 nt, synthetic construct
  misc_feature 1..20: note = spacer sequence
  source 1..20: mol_type = other RNA
ttttttccaacaaatagtgc

SEQ ID NO: 11423 - RNA, 20 nt, synthetic construct
  misc_feature 1..20: note = spacer sequence
  source 1..20: mol_type = other RNA
tttcccccattgaattactt

SEQ ID NO: 11424 - RNA, 20 nt, synthetic construct
  misc_feature 1..20: note = spacer sequence
  source 1..20: mol_type = other RNA
cccattgaattactttgcct

SEQ ID NO: 11425 - RNA, 20 nt, synthetic construct
  misc_feature 1..20: note = spacer sequence
  source 1..20: mol_type = other RNA
ttgcaaattgaacccggcaa

SEQ ID NO: 11426 - RNA, 20 nt, synthetic construct
  misc_feature 1..20: note = spacer sequence
  source 1..20: mol_type = other RNA
gtctgtcaaaatatttcctt

SEQ ID NO: 11427 - RNA, 20 nt, synthetic construct
  misc_feature 1..20: note = spacer sequence
  source 1..20: mol_type = other RNA
gtcaaaatatttccttctat

SEQ ID NO: 11428 - RNA, 20 nt, synthetic construct
  misc_feature 1..20: note = spacer sequence
  source 1..20: mol_type = other RNA
aaatatttccttctatattc

SEQ ID NO: 11429 - RNA, 20 nt, synthetic construct
  misc_feature 1..20: note = spacer sequence
  source 1..20: mol_type = other RNA
ttctatattcatgagtggta

SEQ ID NO: 11430 - RNA, 20 nt, synthetic construct
  misc_feature 1..20: note = spacer sequence
  source 1..20: mol_type = other RNA
atattcatgagtggtattgg

SEQ ID NO: 11431 - RNA, 20 nt, synthetic construct
  misc_feature 1..20: note = spacer sequence
  source 1..20: mol_type = other RNA
tgagtggtattggtggtctc

SEQ ID NO: 11432 - RNA, 20 nt, synthetic construct
  misc_feature 1..20: note = spacer sequence
  source 1..20: mol_type = other RNA
tgaatatagaaggaaatatt

SEQ ID NO: 11433 - RNA, 20 nt, synthetic construct
  misc_feature 1..20: note = spacer sequence
  source 1..20: mol_type = other RNA
ctgttttccttttcttgtaa

SEQ ID NO: 11434 - RNA, 20 nt, synthetic construct
  misc_feature 1..20: note = spacer sequence
  source 1..20: mol_type = other RNA
gttttccttttcttgtaatg

SEQ ID NO: 11435 - RNA, 20 nt, synthetic construct
  misc_feature 1..20: note = spacer sequence
  source 1..20: mol_type = other RNA
ttttcttgtaatggttttgg

SEQ ID NO: 11436 - RNA, 20 nt, synthetic construct
  misc_feature 1..20: note = spacer sequence
  source 1..20: mol_type = other RNA
tgtaatggttttggtgtcgg

SEQ ID NO: 11437 - RNA, 20 nt, synthetic construct
  misc_feature 1..20: note = spacer sequence
  source 1..20: mol_type = other RNA
gggtagcttgctctcatcaa

SEQ ID NO: 11438 - RNA, 20 nt, synthetic construct
  misc_feature 1..20: note = spacer sequence
  source 1..20: mol_type = other RNA
catcaaattatttgataagt

SEQ ID NO: 11439 - RNA, 20 nt, synthetic construct
  misc_feature 1..20: note = spacer sequence
  source 1..20: mol_type = other RNA
tcaaattatttgataagtgc

SEQ ID NO: 11440 - RNA, 20 nt, synthetic construct
  misc_feature 1..20: note = spacer sequence
  source 1..20: mol_type = other RNA
aattatttgataagtgcttc

SEQ ID NO: 11441 - RNA, 20 nt, synthetic construct
  misc_feature 1..20: note = spacer sequence
  source 1..20: mol_type = other RNA
ttctctattttctaaaatag

SEQ ID NO: 11442 - RNA, 20 nt, synthetic construct
  misc_feature 1..20: note = spacer sequence
  source 1..20: mol_type = other RNA
ctattttctaaaatagcctg

SEQ ID NO: 11443 - RNA, 20 nt, synthetic construct
  misc_feature 1..20: note = spacer sequence
  source 1..20: mol_type = other RNA
attttctaaaatagcctgtg

SEQ ID NO: 11444 - RNA, 20 nt, synthetic construct
  misc_feature 1..20: note = spacer sequence
  source 1..20: mol_type = other RNA
aaaatagcctgtgtggaatt

SEQ ID NO: 11445 - RNA, 20 nt, synthetic construct
  misc_feature 1..20: note = spacer sequence
  source 1..20: mol_type = other RNA
acacaggctattttagaaaa

SEQ ID NO: 11446 - RNA, 20 nt, synthetic construct
  misc_feature 1..20: note = spacer sequence
  source 1..20: mol_type = other RNA
attccacacaggctatttta

SEQ ID NO: 11447 - RNA, 20 nt, synthetic construct
  misc_feature 1..20: note = spacer sequence
  source 1..20: mol_type = other RNA
ttcttaagatttgttagaat

SEQ ID NO: 11448 - RNA, 20 nt, synthetic construct
  misc_feature 1..20: note = spacer sequence
  source 1..20: mol_type = other RNA
taagatttgttagaattcac

SEQ ID NO: 11449 - RNA, 20 nt, synthetic construct
  misc_feature 1..20: note = spacer sequence
  source 1..20: mol_type = other RNA
taagaaagaaataatatcaa

SEQ ID NO: 11450 - RNA, 20 nt, synthetic construct
  misc_feature 1..20: note = spacer sequence
  source 1..20: mol_type = other RNA
aacaaatcttaagaaagaaa

SEQ ID NO: 11451 - RNA, 20 nt, synthetic construct
  misc_feature 1..20: note = spacer sequence
  source 1..20: mol_type = other RNA
ccaatgaagccacttgggcc

SEQ ID NO: 11452 - RNA, 20 nt, synthetic construct
  misc_feature 1..20: note = spacer sequence
  source 1..20: mol_type = other RNA
ttggtgaattctaacaaatc

SEQ ID NO: 11453 - RNA, 20 nt, synthetic construct
  misc_feature 1..20: note = spacer sequence
  source 1..20: mol_type = other RNA
caaattttggagtgttgtat

SEQ ID NO: 11454 - RNA, 20 nt, synthetic construct
  misc_feature 1..20: note = spacer sequence
  source 1..20: mol_type = other RNA
aattttggagtgttgtattt

SEQ ID NO: 11455 - RNA, 20 nt, synthetic construct
  misc_feature 1..20: note = spacer sequence
  source 1..20: mol_type = other RNA
aaaatttgagaagtaaattt

SEQ ID NO: 11456 - RNA, 20 nt, synthetic construct
  misc_feature 1..20: note = spacer sequence
  source 1..20: mol_type = other RNA
taaatatttagttcaaaata

SEQ ID NO: 11457 - RNA, 20 nt, synthetic construct
  misc_feature 1..20: note = spacer sequence
  source 1..20: mol_type = other RNA
aaatattttgtaatttccct

SEQ ID NO: 11458 - RNA, 20 nt, synthetic construct
  misc_feature 1..20: note = spacer sequence
  source 1..20: mol_type = other RNA
ttctgtgattgattatacta

SEQ ID NO: 11459 - RNA, 20 nt, synthetic construct
  misc_feature 1..20: note = spacer sequence
  source 1..20: mol_type = other RNA
gtgattgattatactaatcg

SEQ ID NO: 11460 - RNA, 20 nt, synthetic construct
  misc_feature 1..20: note = spacer sequence
  source 1..20: mol_type = other RNA
cagaaagataacagaaattc

SEQ ID NO: 11461 - RNA, 20 nt, synthetic construct
  misc_feature 1..20: note = spacer sequence
  source 1..20: mol_type = other RNA
atcacagaaagataacagaa

SEQ ID NO: 11462 - RNA, 20 nt, synthetic construct
  misc_feature 1..20: note = spacer sequence
  source 1..20: mol_type = other RNA
aattccattatagtcacata

SEQ ID NO: 11463 - RNA, 20 nt, synthetic construct
  misc_feature 1..20: note = spacer sequence
  source 1..20: mol_type = other RNA
attagtataatcaatcacag

SEQ ID NO: 11464 - RNA, 20 nt, synthetic construct
  misc_feature 1..20: note = spacer sequence
  source 1..20: mol_type = other RNA
attatagtcacatatcatac

SEQ ID NO: 11465 - RNA, 20 nt, synthetic construct
  misc_feature 1..20: note = spacer sequence
  source 1..20: mol_type = other RNA
catatcatacttcatatgat

SEQ ID NO: 11466 - RNA, 20 nt, synthetic construct
  misc_feature 1..20: note = spacer sequence
  source 1..20: mol_type = other RNA
tacttcatatgatttcagtt

SEQ ID NO: 11467 - RNA, 20 nt, synthetic construct
  misc_feature 1..20: note = spacer sequence
  source 1..20: mol_type = other RNA
tatgatttcagttttttttt

SEQ ID NO: 11468 - RNA, 20 nt, synthetic construct
  misc_feature 1..20: note = spacer sequence
  source 1..20: mol_type = other RNA
tatgaagtatgatatgtgac

SEQ ID NO: 11469 - RNA, 20 nt, synthetic construct
  misc_feature 1..20: note = spacer sequence
  source 1..20: mol_type = other RNA
gtttttttttaattattgtg

SEQ ID NO: 11470 - RNA, 20 nt, synthetic construct
  misc_feature 1..20: note = spacer sequence
  source 1..20: mol_type = other RNA
caataattaaaaaaaaactg

SEQ ID NO: 11471 - RNA, 20 nt, synthetic construct
  misc_feature 1..20: note = spacer sequence
  source 1..20: mol_type = other RNA
attcatggtctacctagatg

SEQ ID NO: 11472 - RNA, 20 nt, synthetic construct
  misc_feature 1..20: note = spacer sequence
  source 1..20: mol_type = other RNA
tggtctacctagatgattgc

SEQ ID NO: 11473 - RNA, 20 nt, synthetic construct
  misc_feature 1..20: note = spacer sequence
  source 1..20: mol_type = other RNA
attctttttctacctgctta

SEQ ID NO: 11474 - RNA, 20 nt, synthetic construct
  misc_feature 1..20: note = spacer sequence
  source 1..20: mol_type = other RNA
ttttctacctgcttattatg

SEQ ID NO: 11475 - RNA, 20 nt, synthetic construct
  misc_feature 1..20: note = spacer sequence
  source 1..20: mol_type = other RNA
acctgcttattatgtcaatt

SEQ ID NO: 11476 - RNA, 20 nt, synthetic construct
  misc_feature 1..20: note = spacer sequence
  source 1..20: mol_type = other RNA
attagagaggagatttgatg

SEQ ID NO: 11477 - RNA, 20 nt, synthetic construct
  misc_feature 1..20: note = spacer sequence
  source 1..20: mol_type = other RNA
aattgacataataagcaggt

SEQ ID NO: 11478 - RNA, 20 nt, synthetic construct
  misc_feature 1..20: note = spacer sequence
  source 1..20: mol_type = other RNA
ctaattgacataataagcag

SEQ ID NO: 11479 - RNA, 20 nt, synthetic construct
  misc_feature 1..20: note = spacer sequence
  source 1..20: mol_type = other RNA
tctctaattgacataataag

SEQ ID NO: 11480 - RNA, 20 nt, synthetic construct
  misc_feature 1..20: note = spacer sequence
  source 1..20: mol_type = other RNA
cctctctaattgacataata

SEQ ID NO: 11481 - RNA, 20 nt, synthetic construct
  misc_feature 1..20: note = spacer sequence
  source 1..20: mol_type = other RNA
aatctcctctctaattgaca

SEQ ID NO: 11482 - RNA, 20 nt, synthetic construct
  misc_feature 1..20: note = spacer sequence
  source 1..20: mol_type = other RNA
cctgatgtgattgtgcatgt

SEQ ID NO: 11483 - RNA, 20 nt, synthetic construct
  misc_feature 1..20: note = spacer sequence
  source 1..20: mol_type = other RNA
tgatgtgattgtgcatgtat

SEQ ID NO: 11484 - RNA, 20 nt, synthetic construct
  misc_feature 1..20: note = spacer sequence
  source 1..20: mol_type = other RNA
ggagacatcaaatctcctct

SEQ ID NO: 11485 - RNA, 20 nt, synthetic construct
  misc_feature 1..20: note = spacer sequence
  source 1..20: mol_type = other RNA
catcaggagacatcaaatct

SEQ ID NO: 11486 - RNA, 20 nt, synthetic construct
  misc_feature 1..20: note = spacer sequence
  source 1..20: mol_type = other RNA
cctttcaatagctttgtgta

SEQ ID NO: 11487 - RNA, 20 nt, synthetic construct
  misc_feature 1..20: note = spacer sequence
  source 1..20: mol_type = other RNA
tttcaatagctttgtgtatt

SEQ ID NO: 11488 - RNA, 20 nt, synthetic construct
  misc_feature 1..20: note = spacer sequence
  source 1..20: mol_type = other RNA
atagctttgtgtattttttt

SEQ ID NO: 11489 - RNA, 20 nt, synthetic construct
  misc_feature 1..20: note = spacer sequence
  source 1..20: mol_type = other RNA
ggctgactcatgtatattga

SEQ ID NO: 11490 - RNA, 20 nt, synthetic construct
  misc_feature 1..20: note = spacer sequence
  source 1..20: mol_type = other RNA
gccagacgcagtggctcaca

SEQ ID NO: 11491 - RNA, 20 nt, synthetic construct
  misc_feature 1..20: note = spacer sequence
  source 1..20: mol_type = other RNA
tgtatattgaagctttgtta

SEQ ID NO: 11492 - RNA, 20 nt, synthetic construct
  misc_feature 1..20: note = spacer sequence
  source 1..20: mol_type = other RNA
atatacatgagtcagccaga

SEQ ID NO: 11493 - RNA, 20 nt, synthetic construct
  misc_feature 1..20: note = spacer sequence
  source 1..20: mol_type = other RNA
ccttgatgaatagactcctt

SEQ ID NO: 11494 - RNA, 20 nt, synthetic construct
  misc_feature 1..20: note = spacer sequence
  source 1..20: mol_type = other RNA
ttgatgaatagactccttat

SEQ ID NO: 11495 - RNA, 20 nt, synthetic construct
  misc_feature 1..20: note = spacer sequence
  source 1..20: mol_type = other RNA
aggagaaataataatgctaa

SEQ ID NO: 11496 - RNA, 20 nt, synthetic construct
  misc_feature 1..20: note = spacer sequence
  source 1..20: mol_type = other RNA
tcaaggagaaataataatgc

SEQ ID NO: 11497 - RNA, 20 nt, synthetic construct
  misc_feature 1..20: note = spacer sequence
  source 1..20: mol_type = other RNA
attcatcaaggagaaataat

SEQ ID NO: 11498 - RNA, 20 nt, synthetic construct
  misc_feature 1..20: note = spacer sequence
  source 1..20: mol_type = other RNA
ttatcaattggaaaattttc

SEQ ID NO: 11499 - RNA, 20 nt, synthetic construct
  misc_feature 1..20: note = spacer sequence
  source 1..20: mol_type = other RNA
attggaaaattttctctttt

SEQ ID NO: 11500 - RNA, 20 nt, synthetic construct
  misc_feature 1..20: note = spacer sequence
  source 1..20: mol_type = other RNA
aattgataaggagtctattc

SEQ ID NO: 11501 - RNA, 20 nt, synthetic construct
  misc_feature 1..20: note = spacer sequence
  source 1..20: mol_type = other RNA
cttttttctggtaacattcc

SEQ ID NO: 11502 - RNA, 20 nt, synthetic construct
  misc_feature 1..20: note = spacer sequence
  source 1..20: mol_type = other RNA
tttttctggtaacattcctt

SEQ ID NO: 11503 - RNA, 20 nt, synthetic construct
  misc_feature 1..20: note = spacer sequence
  source 1..20: mol_type = other RNA
acaaaaaaatccactttaaa

SEQ ID NO: 11504 - RNA, 20 nt, synthetic construct
  misc_feature 1..20: note = spacer sequence
  source 1..20: mol_type = other RNA
gtccattctgacatgtctga

SEQ ID NO: 11505 - RNA, 20 nt, synthetic construct
  misc_feature 1..20: note = spacer sequence
  source 1..20: mol_type = other RNA
attctgacatgtctgactta

SEQ ID NO: 11506 - RNA, 20 nt, synthetic construct
  misc_feature 1..20: note = spacer sequence
  source 1..20: mol_type = other RNA
gacatgtctgacttaactga

SEQ ID NO: 11507 - RNA, 20 nt, synthetic construct
  misc_feature 1..20: note = spacer sequence
  source 1..20: mol_type = other RNA
gaatggactgaaatgcaagg

SEQ ID NO: 11508 - RNA, 20 nt, synthetic construct
  misc_feature 1..20: note = spacer sequence
  source 1..20: mol_type = other RNA
gacttaactgaattgtttag

SEQ ID NO: 11509 - RNA, 20 nt, synthetic construct
  misc_feature 1..20: note = spacer sequence
  source 1..20: mol_type = other RNA
gacatgtcagaatggactga

SEQ ID NO: 11510 - RNA, 20 nt, synthetic construct
  misc_feature 1..20: note = spacer sequence
  source 1..20: mol_type = other RNA
gttaagtcagacatgtcaga

SEQ ID NO: 11511 - RNA, 20 nt, synthetic construct
  misc_feature 1..20: note = spacer sequence
  source 1..20: mol_type = other RNA
aaacaattcagttaagtcag

SEQ ID NO: 11512 - RNA, 20 nt, synthetic construct
  misc_feature 1..20: note = spacer sequence
  source 1..20: mol_type = other RNA
catttaatgtagttgtcaat

SEQ ID NO: 11513 - RNA, 20 nt, synthetic construct
  misc_feature 1..20: note = spacer sequence
  source 1..20: mol_type = other RNA
atagggttgagtttcattct

SEQ ID NO: 11514 - RNA, 20 nt, synthetic construct
  misc_feature 1..20: note = spacer sequence
  source 1..20: mol_type = other RNA
accctattgacaactacatt

SEQ ID NO: 11515 - RNA, 20 nt, synthetic construct
  misc_feature 1..20: note = spacer sequence
  source 1..20: mol_type = other RNA
ttctaccattttgctgtctg

SEQ ID NO: 11516 - RNA, 20 nt, synthetic construct
  misc_feature 1..20: note = spacer sequence
  source 1..20: mol_type = other RNA
accattttgctgtctgtttt

SEQ ID NO: 11517 - RNA, 20 nt, synthetic construct
  misc_feature 1..20: note = spacer sequence
  source 1..20: mol_type = other RNA
gttttcggtttgtcctgtct

SEQ ID NO: 11518 - RNA, 20 nt, synthetic construct
  misc_feature 1..20: note = spacer sequence
  source 1..20: mol_type = other RNA
gtttgtcctgtctgctctac

SEQ ID NO: 11519 - RNA, 20 nt, synthetic construct
  misc_feature 1..20: note = spacer sequence
  source 1..20: mol_type = other RNA
tgtctgctctactatttttc

SEQ ID NO: 11520 - RNA, 20 nt, synthetic construct
  misc_feature 1..20: note = spacer sequence
  source 1..20: mol_type = other RNA
gctctactatttttctcttc

SEQ ID NO: 11521 - RNA, 20 nt, synthetic construct
  misc_feature 1..20: note = spacer sequence
  source 1..20: mol_type = other RNA
actatttttctcttcatttg

SEQ ID NO: 11522 - RNA, 20 nt, synthetic construct
  misc_feature 1..20: note = spacer sequence
  source 1..20: mol_type = other RNA
cttcatttggctttttttgg

SEQ ID NO: 11523 - RNA, 20 nt, synthetic construct
  misc_feature 1..20: note = spacer sequence
  source 1..20: mol_type = other RNA
cagctactcaagaggctgag

SEQ ID NO: 11524 - RNA, 20 nt, synthetic construct
  misc_feature 1..20: note = spacer sequence
  source 1..20: mol_type = other RNA
agaggctgaggcaggagaat

SEQ ID NO: 11525 - RNA, 20 nt, synthetic construct
  misc_feature 1..20: note = spacer sequence
  source 1..20: mol_type = other RNA
tgagtagctgggattacagg

SEQ ID NO: 11526 - RNA, 20 nt, synthetic construct
  misc_feature 1..20: note = spacer sequence
  source 1..20: mol_type = other RNA
gcctcttgagtagctgggat

SEQ ID NO: 11527 - RNA, 20 nt, synthetic construct
  misc_feature 1..20: note = spacer sequence
  source 1..20: mol_type = other RNA
tgcctcagcctcttgagtag

SEQ ID NO: 11528 - RNA, 20 nt, synthetic construct
  misc_feature 1..20: note = spacer sequence
  source 1..20: mol_type = other RNA
cctgcctcagcctcttgagt

SEQ ID NO: 11529 - RNA, 20 nt, synthetic construct
  misc_feature 1..20: note = spacer sequence
  source 1..20: mol_type = other RNA
agcaattctcctgcctcagc

SEQ ID NO: 11530 - RNA, 20 nt, synthetic construct
  misc_feature 1..20: note = spacer sequence
  source 1..20: mol_type = other RNA
tgggttcaagcaattctcct

SEQ ID NO: 11531 - RNA, 20 nt, synthetic construct
  misc_feature 1..20: note = spacer sequence
  source 1..20: mol_type = other RNA
ccctcctgggttcaagcaat

SEQ ID NO: 11532 - RNA, 20 nt, synthetic construct
  misc_feature 1..20: note = spacer sequence
  source 1..20: mol_type = other RNA
ctgcaacctccccctcctgg

SEQ ID NO: 11533 - RNA, 20 nt, synthetic construct
  misc_feature 1..20: note = spacer sequence
  source 1..20: mol_type = other RNA
gctcactgcaacctccccct

SEQ ID NO: 11534 - RNA, 20 nt, synthetic construct
  misc_feature 1..20: note = spacer sequence
  source 1..20: mol_type = other RNA
cggctcactgcaacctcccc

SEQ ID NO: 11535 - RNA, 20 nt, synthetic construct
  misc_feature 1..20: note = spacer sequence
  source 1..20: mol_type = other RNA
cgccactgcactccagcctg

SEQ ID NO: 11536 - RNA, 20 nt, synthetic construct
  misc_feature 1..20: note = spacer sequence
  source 1..20: mol_type = other RNA
agcctgggcaacagagcaag

SEQ ID NO: 11537 - RNA, 20 nt, synthetic construct
  misc_feature 1..20: note = spacer sequence
  source 1..20: mol_type = other RNA
gttgcccaggctggagtgca

SEQ ID NO: 11538 - RNA, 20 nt, synthetic construct
  misc_feature 1..20: note = spacer sequence
  source 1..20: mol_type = other RNA
tgctctgttgcccaggctgg

SEQ ID NO: 11539 - RNA, 20 nt, synthetic construct
  misc_feature 1..20: note = spacer sequence
  source 1..20: mol_type = other RNA
gtctcaaaaaaaaaaaaaat

SEQ ID NO: 11540 - RNA, 20 nt, synthetic construct
  misc_feature 1..20: note = spacer sequence
  source 1..20: mol_type = other RNA
caaaaaaaaaaaaaattttt

SEQ ID NO: 11541 - RNA, 20 nt, synthetic construct
  misc_feature 1..20: note = spacer sequence
  source 1..20: mol_type = other RNA
aaaaaaaaaaaaatttttgt

SEQ ID NO: 11542 - RNA, 20 nt, synthetic construct
  misc_feature 1..20: note = spacer sequence
  source 1..20: mol_type = other RNA
gctgtcagtgaaacctctct

SEQ ID NO: 11543 - RNA, 20 nt, synthetic construct
  misc_feature 1..20: note = spacer sequence
  source 1..20: mol_type = other RNA
gtgaaacctctctgttcttg

SEQ ID NO: 11544 - RNA, 20 nt, synthetic construct
  misc_feature 1..20: note = spacer sequence
  source 1..20: mol_type = other RNA
ctgacagcagatgtgcacta

SEQ ID NO: 11545 - RNA, 20 nt, synthetic construct
  misc_feature 1..20: note = spacer sequence
  source 1..20: mol_type = other RNA
ctgttcttgttgatctgaaa

SEQ ID NO: 11546 - RNA, 20 nt, synthetic construct
  misc_feature 1..20: note = spacer sequence
  source 1..20: mol_type = other RNA
gttcttgttgatctgaaaaa

SEQ ID NO: 11547 - RNA, 20 nt, synthetic construct
  misc_feature 1..20: note = spacer sequence
  source 1..20: mol_type = other RNA
tgttgatctgaaaaagtcta

SEQ ID NO: 11548 - RNA, 20 nt, synthetic construct
  misc_feature 1..20: note = spacer sequence
  source 1..20: mol_type = other RNA
acaagaacagagaggtttca

SEQ ID NO: 11549 - RNA, 20 nt, synthetic construct
  misc_feature 1..20: note = spacer sequence
  source 1..20: mol_type = other RNA
gaaaaagtctatattttacc

SEQ ID NO: 11550 - RNA, 20 nt, synthetic construct
  misc_feature 1..20: note = spacer sequence
  source 1..20: mol_type = other RNA
gatcaacaagaacagagagg

SEQ ID NO: 11551 - RNA, 20 nt, synthetic construct
  misc_feature 1..20: note = spacer sequence
  source 1..20: mol_type = other RNA
atattttacctgaaattctg

SEQ ID NO: 11552 - RNA, 20 nt, synthetic construct
  misc_feature 1..20: note = spacer sequence
  source 1..20: mol_type = other RNA
ggtaaaatatagactttttc

SEQ ID NO: 11553 - RNA, 20 nt, synthetic construct
  misc_feature 1..20: note = spacer sequence
  source 1..20: mol_type = other RNA
gaaagggattttctgtgggt

SEQ ID NO: 11554 - RNA, 20 nt, synthetic construct
  misc_feature 1..20: note = spacer sequence
  source 1..20: mol_type = other RNA
gaatttcaggtaaaatatag

SEQ ID NO: 11555 - RNA, 20 nt, synthetic construct
  misc_feature 1..20: note = spacer sequence
  source 1..20: mol_type = other RNA
ctttcagaatttcaggtaaa

SEQ ID NO: 11556 - RNA, 20 nt, synthetic construct
  misc_feature 1..20: note = spacer sequence
  source 1..20: mol_type = other RNA
gtgggtatagaattctacat

SEQ ID NO: 11557 - RNA, 20 nt, synthetic construct
  misc_feature 1..20: note = spacer sequence
  source 1..20: mol_type = other RNA
atacccacagaaaatccctt

SEQ ID NO: 11558 - RNA, 20 nt, synthetic construct
  misc_feature 1..20: note = spacer sequence
  source 1..20: mol_type = other RNA
acatttacagggtttgcccc

SEQ ID NO: 11559 - RNA, 20 nt, synthetic construct
  misc_feature 1..20: note = spacer sequence
  source 1..20: mol_type = other RNA
agtgctaggtaaggggcaaa

SEQ ID NO: 11560 - RNA, 20 nt, synthetic construct
  misc_feature 1..20: note = spacer sequence
  source 1..20: mol_type = other RNA
ttccattgttttctggcttg

SEQ ID NO: 11561 - RNA, 20 nt, synthetic construct
  misc_feature 1..20: note = spacer sequence
  source 1..20: mol_type = other RNA
attgttttctggcttgcata

SEQ ID NO: 11562 - RNA, 20 nt, synthetic construct
  misc_feature 1..20: note = spacer sequence
  source 1..20: mol_type = other RNA
ggcttgcatagtttctcatg

SEQ ID NO: 11563 - RNA, 20 nt, synthetic construct
  misc_feature 1..20: note = spacer sequence
  source 1..20: mol_type = other RNA
tatatttgtaaataattgcc

SEQ ID NO: 11564 - RNA, 20 nt, synthetic construct
  misc_feature 1..20: note = spacer sequence
  source 1..20: mol_type = other RNA
aatgtctgaaaattgttatt

SEQ ID NO: 11565 - RNA, 20 nt, synthetic construct
  misc_feature 1..20: note = spacer sequence
  source 1..20: mol_type = other RNA
gaaaattgttatttcctgta

SEQ ID NO: 11566 - RNA, 20 nt, synthetic construct
  misc_feature 1..20: note = spacer sequence
  source 1..20: mol_type = other RNA
gacattggacaaaaggcaat

SEQ ID NO: 11567 - RNA, 20 nt, synthetic construct
  misc_feature 1..20: note = spacer sequence
  source 1..20: mol_type = other RNA
tgtatattttccagttttct

SEQ ID NO: 11568 - RNA, 20 nt, synthetic construct
  misc_feature 1..20: note = spacer sequence
  source 1..20: mol_type = other RNA
agttttctggtttgtttctt

SEQ ID NO: 11569 - RNA, 20 nt, synthetic construct
  misc_feature 1..20: note = spacer sequence
  source 1..20: mol_type = other RNA
ggtttgtttcttttttatgg

SEQ ID NO: 11570 - RNA, 20 nt, synthetic construct
  misc_feature 1..20: note = spacer sequence
  source 1..20: mol_type = other RNA
tttttatggtgaaatggtaa

SEQ ID NO: 11571 - RNA, 20 nt, synthetic construct
  misc_feature 1..20: note = spacer sequence
  source 1..20: mol_type = other RNA
ccataaaaaagaaacaaacc

SEQ ID NO: 11572 - RNA, 20 nt, synthetic construct
  misc_feature 1..20: note = spacer sequence
  source 1..20: mol_type = other RNA
gtaccgttactacctcatga

SEQ ID NO: 11573 - RNA, 20 nt, synthetic construct
  misc_feature 1..20: note = spacer sequence
  source 1..20: mol_type = other RNA
tgatgagagacagaagttcc

SEQ ID NO: 11574 - RNA, 20 nt, synthetic construct
  misc_feature 1..20: note = spacer sequence
  source 1..20: mol_type = other RNA
tgaggtagtaacggtacaga

SEQ ID NO: 11575 - RNA, 20 nt, synthetic construct
  misc_feature 1..20: note = spacer sequence
  source 1..20: mol_type = other RNA
tcatgaggtagtaacggtac

SEQ ID NO: 11576 - RNA, 20 nt, synthetic construct
  misc_feature 1..20: note = spacer sequence
  source 1..20: mol_type = other RNA
catcatgaggtagtaacggt

SEQ ID NO: 11577 - RNA, 20 nt, synthetic construct
  misc_feature 1..20: note = spacer sequence
  source 1..20: mol_type = other RNA
ctcatcatgaggtagtaacg

SEQ ID NO: 11578 - RNA, 20 nt, synthetic construct
  misc_feature 1..20: note = spacer sequence
  source 1..20: mol_type = other RNA
gtctctcatcatgaggtagt

SEQ ID NO: 11579 - RNA, 20 nt, synthetic construct
  misc_feature 1..20: note = spacer sequence
  source 1..20: mol_type = other RNA
atacttagagcctttttgtg

SEQ ID NO: 11580 - RNA, 20 nt, synthetic construct
  misc_feature 1..20: note = spacer sequence
  source 1..20: mol_type = other RNA
aagtatggaacttctgtctc

SEQ ID NO: 11581 - RNA, 20 nt, synthetic construct
  misc_feature 1..20: note = spacer sequence
  source 1..20: mol_type = other RNA
aagaattctttgcctgtcct

SEQ ID NO: 11582 - RNA, 20 nt, synthetic construct
  misc_feature 1..20: note = spacer sequence
  source 1..20: mol_type = other RNA
tagaacacaaaaaggctcta

SEQ ID NO: 11583 - RNA, 20 nt, synthetic construct
  misc_feature 1..20: note = spacer sequence
  source 1..20: mol_type = other RNA
ttgcctgtcctaagatcatg

SEQ ID NO: 11584 - RNA, 20 nt, synthetic construct
  misc_feature 1..20: note = spacer sequence
  source 1..20: mol_type = other RNA
taagatcatgaggatatcct

SEQ ID NO: 11585 - RNA, 20 nt, synthetic construct
  misc_feature 1..20: note = spacer sequence
  source 1..20: mol_type = other RNA
taggacaggcaaagaattct

SEQ ID NO: 11586 - RNA, 20 nt, synthetic construct
  misc_feature 1..20: note = spacer sequence
  source 1..20: mol_type = other RNA
tgaggatatcctctgtgttt

SEQ ID NO: 11587 - RNA, 20 nt, synthetic construct
  misc_feature 1..20: note = spacer sequence
  source 1..20: mol_type = other RNA
tgatcttaggacaggcaaag

SEQ ID NO: 11588 - RNA, 20 nt, synthetic construct
  misc_feature 1..20: note = spacer sequence
  source 1..20: mol_type = other RNA
tcatgatcttaggacaggca

SEQ ID NO: 11589 - RNA, 20 nt, synthetic construct
  misc_feature 1..20: note = spacer sequence
  source 1..20: mol_type = other RNA
tctgtgtttcttttaaaagc

SEQ ID NO: 11590 - RNA, 20 nt, synthetic construct
  misc_feature 1..20: note = spacer sequence
  source 1..20: mol_type = other RNA
gtgtttcttttaaaagcttt

SEQ ID NO: 11591 - RNA, 20 nt, synthetic construct
  misc_feature 1..20: note = spacer sequence
  source 1..20: mol_type = other RNA
tttaaaagctttacagtttt

SEQ ID NO: 11592 - RNA, 20 nt, synthetic construct
  misc_feature 1..20: note = spacer sequence
  source 1..20: mol_type = other RNA
gtgcactaaaactgtaaagc

SEQ ID NO: 11593 - RNA, 20 nt, synthetic construct
  misc_feature 1..20: note = spacer sequence
  source 1..20: mol_type = other RNA
atggcctatctcaagtaaat

SEQ ID NO: 11594 - RNA, 20 nt, synthetic construct
  misc_feature 1..20: note = spacer sequence
  source 1..20: mol_type = other RNA
caagtaaatttttttgtatg

SEQ ID NO: 11595 - RNA, 20 nt, synthetic construct
  misc_feature 1..20: note = spacer sequence
  source 1..20: mol_type = other RNA
agtaaatttttttgtatgtg

SEQ ID NO: 11596 - RNA, 20 nt, synthetic construct
  misc_feature 1..20: note = spacer sequence
  source 1..20: mol_type = other RNA
cgcacatacaaaaaaattta

SEQ ID NO: 11597 - RNA, 20 nt, synthetic construct
  misc_feature 1..20: note = spacer sequence
  source 1..20: mol_type = other RNA
cacgcacatacaaaaaaatt

SEQ ID NO: 11598 - RNA, 20 nt, synthetic construct
  misc_feature 1..20: note = spacer sequence
  source 1..20: mol_type = other RNA
tgtctcacgcacatacaaaa

SEQ ID NO: 11599 - RNA, 20 nt, synthetic construct
  misc_feature 1..20: note = spacer sequence
  source 1..20: mol_type = other RNA
ttttttaaaaagttatttca

SEQ ID NO: 11600 - RNA, 20 nt, synthetic construct
  misc_feature 1..20: note = spacer sequence
  source 1..20: mol_type = other RNA
tcatcctttattgaaaagct

SEQ ID NO: 11601 - RNA, 20 nt, synthetic construct
  misc_feature 1..20: note = spacer sequence
  source 1..20: mol_type = other RNA
tcctttattgaaaagctttc

SEQ ID NO: 11602 - RNA, 20 nt, synthetic construct
  misc_feature 1..20: note = spacer sequence
  source 1..20: mol_type = other RNA
tttattgaaaagctttcttc

SEQ ID NO: 11603 - RNA, 20 nt, synthetic construct
  misc_feature 1..20: note = spacer sequence
  source 1..20: mol_type = other RNA
ataaaggatgatgaaataac

SEQ ID NO: 11604 - RNA, 20 nt, synthetic construct
  misc_feature 1..20: note = spacer sequence
  source 1..20: mol_type = other RNA
tccctccattgaactgcatt

SEQ ID NO: 11605 - RNA, 20 nt, synthetic construct
  misc_feature 1..20: note = spacer sequence
  source 1..20: mol_type = other RNA
ctccattgaactgcattgga

SEQ ID NO: 11606 - RNA, 20 nt, synthetic construct
  misc_feature 1..20: note = spacer sequence
  source 1..20: mol_type = other RNA
attgaactgcattggaactt

SEQ ID NO: 11607 - RNA, 20 nt, synthetic construct
  misc_feature 1..20: note = spacer sequence
  source 1..20: mol_type = other RNA
atggagggaagaaagctttt

SEQ ID NO: 11608 - RNA, 20 nt, synthetic construct
  misc_feature 1..20: note = spacer sequence
  source 1..20: mol_type = other RNA
aatgcagttcaatggaggga

SEQ ID NO: 11609 - RNA, 20 nt, synthetic construct
  misc_feature 1..20: note = spacer sequence
  source 1..20: mol_type = other RNA
gtctaaaattaagtggctac

SEQ ID NO: 11610 - RNA, 20 nt, synthetic construct
  misc_feature 1..20: note = spacer sequence
  source 1..20: mol_type = other RNA
aaaattaagtggctacatat

SEQ ID NO: 11611 - RNA, 20 nt, synthetic construct
  misc_feature 1..20: note = spacer sequence
  source 1..20: mol_type = other RNA
gacctcattattctgttcct

SEQ ID NO: 11612 - RNA, 20 nt, synthetic construct
  misc_feature 1..20: note = spacer sequence
  source 1..20: mol_type = other RNA
gaaataggcccacacatatg

SEQ ID NO: 11613 - RNA, 20 nt, synthetic construct
  misc_feature 1..20: note = spacer sequence
  source 1..20: mol_type = other RNA
ttattctgttcctttcatca

SEQ ID NO: 11614 - RNA, 20 nt, synthetic construct
  misc_feature 1..20: note = spacer sequence
  source 1..20: mol_type = other RNA
gttcctttcatcaccagtac

SEQ ID NO: 11615 - RNA, 20 nt, synthetic construct
  misc_feature 1..20: note = spacer sequence
  source 1..20: mol_type = other RNA
tttcatcaccagtaccacac

SEQ ID NO: 11616 - RNA, 20 nt, synthetic construct
  misc_feature 1..20: note = spacer sequence
  source 1..20: mol_type = other RNA
tcaccagtaccacactgtct

SEQ ID NO: 11617 - RNA, 20 nt, synthetic construct
  misc_feature 1..20: note = spacer sequence
  source 1..20: mol_type = other RNA
ccagtaccacactgtcttga

SEQ ID NO: 11618 - RNA, 20 nt, synthetic construct
  misc_feature 1..20: note = spacer sequence
  source 1..20: mol_type = other RNA
tgattgctgtaactttatag

SEQ ID NO: 11619 - RNA, 20 nt, synthetic construct
  misc_feature 1..20: note = spacer sequence
  source 1..20: mol_type = other RNA
agacagtgtggtactggtga

SEQ ID NO: 11620 - RNA, 20 nt, synthetic construct
  misc_feature 1..20: note = spacer sequence
  source 1..20: mol_type = other RNA
aaacttactataaagttaca

SEQ ID NO: 11621 - RNA, 20 nt, synthetic construct
  misc_feature 1..20: note = spacer sequence
  source 1..20: mol_type = other RNA
taatttcaaaacttactata

SEQ ID NO: 11622 - RNA, 20 nt, synthetic construct
  misc_feature 1..20: note = spacer sequence
  source 1..20: mol_type = other RNA
tccaactttgctcttctttg

SEQ ID NO: 11623 - RNA, 20 nt, synthetic construct
  misc_feature 1..20: note = spacer sequence
  source 1..20: mol_type = other RNA
aactttgctcttctttgagg

SEQ ID NO: 11624 - RNA, 20 nt, synthetic construct
  misc_feature 1..20: note = spacer sequence
  source 1..20: mol_type = other RNA
tctttgaggttatcttgtca

SEQ ID NO: 11625 - RNA, 20 nt, synthetic construct
  misc_feature 1..20: note = spacer sequence
  source 1..20: mol_type = other RNA
ttgaggttatcttgtcacaa

SEQ ID NO: 11626 - RNA, 20 nt, synthetic construct
  misc_feature 1..20: note = spacer sequence
  source 1..20: mol_type = other RNA
aagaagagcaaagttggaag

SEQ ID NO: 11627 - RNA, 20 nt, synthetic construct
  misc_feature 1..20: note = spacer sequence
  source 1..20: mol_type = other RNA
tgtcacaaggacccaagtgg

SEQ ID NO: 11628 - RNA, 20 nt, synthetic construct
  misc_feature 1..20: note = spacer sequence
  source 1..20: mol_type = other RNA
caaggacccaagtggcagta

SEQ ID NO: 11629 - RNA, 20 nt, synthetic construct
  misc_feature 1..20: note = spacer sequence
  source 1..20: mol_type = other RNA
ttgtgacaagataacctcaa

SEQ ID NO: 11630 - RNA, 20 nt, synthetic construct
  misc_feature 1..20: note = spacer sequence
  source 1..20: mol_type = other RNA
tcaggtgattccaatgtgaa

SEQ ID NO: 11631 - RNA, 20 nt, synthetic construct
  misc_feature 1..20: note = spacer sequence
  source 1..20: mol_type = other RNA
ggtgattccaatgtgaagcc

SEQ ID NO: 11632 - RNA, 20 nt, synthetic construct
  misc_feature 1..20: note = spacer sequence
  source 1..20: mol_type = other RNA
cctgaggagctttaaaaatt

SEQ ID NO: 11633 - RNA, 20 nt, synthetic construct
  misc_feature 1..20: note = spacer sequence
  source 1..20: mol_type = other RNA
aatgtgaagccaaggttaag

SEQ ID NO: 11634 - RNA, 20 nt, synthetic construct
  misc_feature 1..20: note = spacer sequence
  source 1..20: mol_type = other RNA
cattggaatcacctgaggag

SEQ ID NO: 11635 - RNA, 20 nt, synthetic construct
  misc_feature 1..20: note = spacer sequence
  source 1..20: mol_type = other RNA
taaccttggcttcacattgg

SEQ ID NO: 11636 - RNA, 20 nt, synthetic construct
  misc_feature 1..20: note = spacer sequence
  source 1..20: mol_type = other RNA
taggggctgaggagtcctag

SEQ ID NO: 11637 - RNA, 20 nt, synthetic construct
  misc_feature 1..20: note = spacer sequence
  source 1..20: mol_type = other RNA
gcccctaagacggtacttct

SEQ ID NO: 11638 - RNA, 20 nt, synthetic construct
  misc_feature 1..20: note = spacer sequence
  source 1..20: mol_type = other RNA
tcagcccctaagacggtact

SEQ ID NO: 11639 - RNA, 20 nt, synthetic construct
  misc_feature 1..20: note = spacer sequence
  source 1..20: mol_type = other RNA
taggctggtcccgctgggtt

SEQ ID NO: 11640 - RNA, 20 nt, synthetic construct
  misc_feature 1..20: note = spacer sequence
  source 1..20: mol_type = other RNA
cgctgggtttgtggttttgt

SEQ ID NO: 11641 - RNA, 20 nt, synthetic construct
  misc_feature 1..20: note = spacer sequence
  source 1..20: mol_type = other RNA
acgcatttccttcaggacag

SEQ ID NO: 11642 - RNA, 20 nt, synthetic construct
  misc_feature 1..20: note = spacer sequence
  source 1..20: mol_type = other RNA
ttcaggacagtatgtttata

SEQ ID NO: 11643 - RNA, 20 nt, synthetic construct
  misc_feature 1..20: note = spacer sequence
  source 1..20: mol_type = other RNA
ggacagtatgtttatagtct

SEQ ID NO: 11644 - RNA, 20 nt, synthetic construct
  misc_feature 1..20: note = spacer sequence
  source 1..20: mol_type = other RNA
tgaaggaaatgcgttgaaaa

SEQ ID NO: 11645 - RNA, 20 nt, synthetic construct
  misc_feature 1..20: note = spacer sequence
  source 1..20: mol_type = other RNA
gtttgcttctgaataatttc

SEQ ID NO: 11646 - RNA, 20 nt, synthetic construct
  misc_feature 1..20: note = spacer sequence
  source 1..20: mol_type = other RNA
gaataatttcatgtgtaagt

SEQ ID NO: 11647 - RNA, 20 nt, synthetic construct
  misc_feature 1..20: note = spacer sequence
  source 1..20: mol_type = other RNA
gaagcaaacagactataaac

SEQ ID NO: 11648 - RNA, 20 nt, synthetic construct
  misc_feature 1..20: note = spacer sequence
  source 1..20: mol_type = other RNA
tgtgtaagtaaccacatcca

SEQ ID NO: 11649 - RNA, 20 nt, synthetic construct
  misc_feature 1..20: note = spacer sequence
  source 1..20: mol_type = other RNA
aagggctttgtggagaaatg

SEQ ID NO: 11650 - RNA, 20 nt, synthetic construct
  misc_feature 1..20: note = spacer sequence
  source 1..20: mol_type = other RNA
acaaagcccttggatgtggt

SEQ ID NO: 11651 - RNA, 20 nt, synthetic construct
  misc_feature 1..20: note = spacer sequence
  source 1..20: mol_type = other RNA
ccacaaagcccttggatgtg

SEQ ID NO: 11652 - RNA, 20 nt, synthetic construct
  misc_feature 1..20: note = spacer sequence
  source 1..20: mol_type = other RNA
taggcttaaaggccatttct

SEQ ID NO: 11653 - RNA, 20 nt, synthetic construct
  misc_feature 1..20: note = spacer sequence
  source 1..20: mol_type = other RNA
tggctccaagctgctgatca

SEQ ID NO: 11654 - RNA, 20 nt, synthetic construct
  misc_feature 1..20: note = spacer sequence
  source 1..20: mol_type = other RNA
aagctgctgatcattgtgcc

SEQ ID NO: 11655 - RNA, 20 nt, synthetic construct
  misc_feature 1..20: note = spacer sequence
  source 1..20: mol_type = other RNA
gcagcttggagccaagagtt

SEQ ID NO: 11656 - RNA, 20 nt, synthetic construct
  misc_feature 1..20: note = spacer sequence
  source 1..20: mol_type = other RNA
ttgtgccctgtcccgtcccc

SEQ ID NO: 11657 - RNA, 20 nt, synthetic construct
  misc_feature 1..20: note = spacer sequence
  source 1..20: mol_type = other RNA
cgtcccctctcccataggtt

SEQ ID NO: 11658 - RNA, 20 nt, synthetic construct
  misc_feature 1..20: note = spacer sequence
  source 1..20: mol_type = other RNA
cctctcccataggttcagtg

SEQ ID NO: 11659 - RNA, 20 nt, synthetic construct
  misc_feature 1..20: note = spacer sequence
  source 1..20: mol_type = other RNA
cccataggttcagtggctat

SEQ ID NO: 11660 - RNA, 20 nt, synthetic construct
  misc_feature 1..20: note = spacer sequence
  source 1..20: mol_type = other RNA
cataggttcagtggctattg

SEQ ID NO: 11661 - RNA, 20 nt, synthetic construct
  misc_feature 1..20: note = spacer sequence
  source 1..20: mol_type = other RNA
gtggctattgcatgagataa

SEQ ID NO: 11662 - RNA, 20 nt, synthetic construct
  misc_feature 1..20: note = spacer sequence
  source 1..20: mol_type = other RNA
tgcaatagccactgaaccta

SEQ ID NO: 11663 - RNA, 20 nt, synthetic construct
  misc_feature 1..20: note = spacer sequence
  source 1..20: mol_type = other RNA
catgcaatagccactgaacc

SEQ ID NO: 11664 - RNA, 20 nt, synthetic construct
  misc_feature 1..20: note = spacer sequence
  source 1..20: mol_type = other RNA
aattatctcatgcaatagcc

SEQ ID NO: 11665 - RNA, 20 nt, synthetic construct
  misc_feature 1..20: note = spacer sequence
  source 1..20: mol_type = other RNA
atcaaattatctcatgcaat

SEQ ID NO: 11666 - RNA, 20 nt, synthetic construct
  misc_feature 1..20: note = spacer sequence
  source 1..20: mol_type = other RNA
tttctatcaaattatctcat

SEQ ID NO: 11667 - RNA, 20 nt, synthetic construct
  misc_feature 1..20: note = spacer sequence
  source 1..20: mol_type = other RNA
ccatgtaactcttttctatc

SEQ ID NO: 11668 - RNA, 20 nt, synthetic construct
  misc_feature 1..20: note = spacer sequence
  source 1..20: mol_type = other RNA
cctctttggtgtctaagtgc

SEQ ID NO: 11669 - RNA, 20 nt, synthetic construct
  misc_feature 1..20: note = spacer sequence
  source 1..20: mol_type = other RNA
ttggtgtctaagtgcccaaa

SEQ ID NO: 11670 - RNA, 20 nt, synthetic construct
  misc_feature 1..20: note = spacer sequence
  source 1..20: mol_type = other RNA
aagtgcccaaactcccctgc

SEQ ID NO: 11671 - RNA, 20 nt, synthetic construct
  misc_feature 1..20: note = spacer sequence
  source 1..20: mol_type = other RNA
cctgcttagacagtcacttt

SEQ ID NO: 11672 - RNA, 20 nt, synthetic construct
  misc_feature 1..20: note = spacer sequence
  source 1..20: mol_type = other RNA
aagcaggggagtttgggcac

SEQ ID NO: 11673 - RNA, 20 nt, synthetic construct
  misc_feature 1..20: note = spacer sequence
  source 1..20: mol_type = other RNA
ctttcctgcgtccccttgta

SEQ ID NO: 11674 - RNA, 20 nt, synthetic construct
  misc_feature 1..20: note = spacer sequence
  source 1..20: mol_type = other RNA
tgcgtccccttgtattagct

SEQ ID NO: 11675 - RNA, 20 nt, synthetic construct
  misc_feature 1..20: note = spacer sequence
  source 1..20: mol_type = other RNA
ccttgtattagcttcaactg

SEQ ID NO: 11676 - RNA, 20 nt, synthetic construct
  misc_feature 1..20: note = spacer sequence
  source 1..20: mol_type = other RNA
actgaagtagaggaaaaatt

SEQ ID NO: 11677 - RNA, 20 nt, synthetic construct
  misc_feature 1..20: note = spacer sequence
  source 1..20: mol_type = other RNA
gttgaagctaatacaagggg

SEQ ID NO: 11678 - RNA, 20 nt, synthetic construct
  misc_feature 1..20: note = spacer sequence
  source 1..20: mol_type = other RNA
acttcagttgaagctaatac

SEQ ID NO: 11679 - RNA, 20 nt, synthetic construct
  misc_feature 1..20: note = spacer sequence
  source 1..20: mol_type = other RNA
tctacttcagttgaagctaa

SEQ ID NO: 11680 - RNA, 20 nt, synthetic construct
  misc_feature 1..20: note = spacer sequence
  source 1..20: mol_type = other RNA
cataattttaagcctggcag

SEQ ID NO: 11681 - RNA, 20 nt, synthetic construct
  misc_feature 1..20: note = spacer sequence
  source 1..20: mol_type = other RNA
ctgttaaattggattggaga

SEQ ID NO: 11682 - RNA, 20 nt, synthetic construct
  misc_feature 1..20: note = spacer sequence
  source 1..20: mol_type = other RNA
gttaaattggattggagaag

SEQ ID NO: 11683 - RNA, 20 nt, synthetic construct
  misc_feature 1..20: note = spacer sequence
  source 1..20: mol_type = other RNA
aatttaacagagagtcccat

SEQ ID NO: 11684 - RNA, 20 nt, synthetic construct
  misc_feature 1..20: note = spacer sequence
  source 1..20: mol_type = other RNA
aatccaatttaacagagagt

SEQ ID NO: 11685 - RNA, 20 nt, synthetic construct
  misc_feature 1..20: note = spacer sequence
  source 1..20: mol_type = other RNA
ccaatccaatttaacagaga

SEQ ID NO: 11686 - RNA, 20 nt, synthetic construct
  misc_feature 1..20: note = spacer sequence
  source 1..20: mol_type = other RNA
tctccaatccaatttaacag

SEQ ID NO: 11687 - RNA, 20 nt, synthetic construct
  misc_feature 1..20: note = spacer sequence
  source 1..20: mol_type = other RNA
catttagtaaaactgatttt

SEQ ID NO: 11688 - RNA, 20 nt, synthetic construct
  misc_feature 1..20: note = spacer sequence
  source 1..20: mol_type = other RNA
gttttactaaatgtgaagtt

SEQ ID NO: 11689 - RNA, 20 nt, synthetic construct
  misc_feature 1..20: note = spacer sequence
  source 1..20: mol_type = other RNA
ccccactcacctctcaaacc

SEQ ID NO: 11690 - RNA, 20 nt, synthetic construct
  misc_feature 1..20: note = spacer sequence
  source 1..20: mol_type = other RNA
cctctcaaaccaggtgtctc

SEQ ID NO: 11691 - RNA, 20 nt, synthetic construct
  misc_feature 1..20: note = spacer sequence
  source 1..20: mol_type = other RNA
caaaccaggtgtctctaagt

SEQ ID NO: 11692 - RNA, 20 nt, synthetic construct
  misc_feature 1..20: note = spacer sequence
  source 1..20: mol_type = other RNA
aaccaggtgtctctaagtta

SEQ ID NO: 11693 - RNA, 20 nt, synthetic construct
  misc_feature 1..20: note = spacer sequence
  source 1..20: mol_type = other RNA
ctaagttaagatctcctctt

SEQ ID NO: 11694 - RNA, 20 nt, synthetic construct
  misc_feature 1..20: note = spacer sequence
  source 1..20: mol_type = other RNA
aagttaagatctcctcttgg

SEQ ID NO: 11695 - RNA, 20 nt, synthetic construct
  misc_feature 1..20: note = spacer sequence
  source 1..20: mol_type = other RNA
taacttagagacacctggtt

SEQ ID NO: 11696 - RNA, 20 nt, synthetic construct
  misc_feature 1..20: note = spacer sequence
  source 1..20: mol_type = other RNA
cctcttggccgggtgcggtg

SEQ ID NO: 11697 - RNA, 20 nt, synthetic construct
  misc_feature 1..20: note = spacer sequence
  source 1..20: mol_type = other RNA
tcttggccgggtgcggtggc

SEQ ID NO: 11698 - RNA, 20 nt, synthetic construct
  misc_feature 1..20: note = spacer sequence
  source 1..20: mol_type = other RNA
tggccgggtgcggtggctca

SEQ ID NO: 11699 - RNA, 20 nt, synthetic construct
  misc_feature 1..20: note = spacer sequence
  source 1..20: mol_type = other RNA
cacctataatcccagcgctt

SEQ ID NO: 11700 - RNA, 20 nt, synthetic construct
  misc_feature 1..20: note = spacer sequence
  source 1..20: mol_type = other RNA
cagcgctttgggaggccgag

SEQ ID NO: 11701 - RNA, 20 nt, synthetic construct
  misc_feature 1..20: note = spacer sequence
  source 1..20: mol_type = other RNA
caaagcgctgggattatagg

SEQ ID NO: 11702 - RNA, 20 nt, synthetic construct
  misc_feature 1..20: note = spacer sequence
  source 1..20: mol_type = other RNA
gcctcccaaagcgctgggat

SEQ ID NO: 11703 - RNA, 20 nt, synthetic construct
  misc_feature 1..20: note = spacer sequence
  source 1..20: mol_type = other RNA
acccgcctcggcctcccaaa

SEQ ID NO: 11704 - RNA, 20 nt, synthetic construct
  misc_feature 1..20: note = spacer sequence
  source 1..20: mol_type = other RNA
caacgtcaggagatcgagac

SEQ ID NO: 11705 - RNA, 20 nt, synthetic construct
  misc_feature 1..20: note = spacer sequence
  source 1..20: mol_type = other RNA
ggagatcgagaccatgctgg

SEQ ID NO: 11706 - RNA, 20 nt, synthetic construct
  misc_feature 1..20: note = spacer sequence
  source 1..20: mol_type = other RNA
tgacgttgtgatccacccgc

SEQ ID NO: 11707 - RNA, 20 nt, synthetic construct
  misc_feature 1..20: note = spacer sequence
  source 1..20: mol_type = other RNA
cctgacgttgtgatccaccc

SEQ ID NO: 11708 - RNA, 20 nt, synthetic construct
  misc_feature 1..20: note = spacer sequence
  source 1..20: mol_type = other RNA
agaccatgctggctaacatg

SEQ ID NO: 11709 - RNA, 20 nt, synthetic construct
  misc_feature 1..20: note = spacer sequence
  source 1..20: mol_type = other RNA
atctcctgacgttgtgatcc

SEQ ID NO: 11710 - RNA, 20 nt, synthetic construct
  misc_feature 1..20: note = spacer sequence
  source 1..20: mol_type = other RNA
cgatctcctgacgttgtgat

SEQ ID NO: 11711 - RNA, 20 nt, synthetic construct
  misc_feature 1..20: note = spacer sequence
  source 1..20: mol_type = other RNA
ccatgttagccagcatggtc

SEQ ID NO: 11712 - RNA, 20 nt, synthetic construct
  misc_feature 1..20: note = spacer sequence
  source 1..20: mol_type = other RNA
ctactaaaaatacaaaaaat

SEQ ID NO: 11713 - RNA, 20 nt, synthetic construct
  misc_feature 1..20: note = spacer sequence
  source 1..20: mol_type = other RNA
actaaaaatacaaaaaatta

SEQ ID NO: 11714 - RNA, 20 nt, synthetic construct
  misc_feature 1..20: note = spacer sequence
  source 1..20: mol_type = other RNA
cagctactcgggaggctgag

SEQ ID NO: 11715 - RNA, 20 nt, synthetic construct
  misc_feature 1..20: note = spacer sequence
  source 1..20: mol_type = other RNA
ggaggctgaggcaggagaat

SEQ ID NO: 11716 - RNA, 20 nt, synthetic construct
  misc_feature 1..20: note = spacer sequence
  source 1..20: mol_type = other RNA
cgagtagctgggactacagg

SEQ ID NO: 11717 - RNA, 20 nt, synthetic construct
  misc_feature 1..20: note = spacer sequence
  source 1..20: mol_type = other RNA
gcctcccgagtagctgggac

SEQ ID NO: 11718 - RNA, 20 nt, synthetic construct
  misc_feature 1..20: note = spacer sequence
  source 1..20: mol_type = other RNA
tgcctcagcctcccgagtag

SEQ ID NO: 11719 - RNA, 20 nt, synthetic construct
  misc_feature 1..20: note = spacer sequence
  source 1..20: mol_type = other RNA
cctgcctcagcctcccgagt

SEQ ID NO: 11720 - RNA, 20 nt, synthetic construct
  misc_feature 1..20: note = spacer sequence
  source 1..20: mol_type = other RNA
tgccattctcctgcctcagc

SEQ ID NO: 11721 - RNA, 20 nt, synthetic construct
  misc_feature 1..20: note = spacer sequence
  source 1..20: mol_type = other RNA
cgggttcatgccattctcct

SEQ ID NO: 11722 - RNA, 20 nt, synthetic construct
  misc_feature 1..20: note = spacer sequence
  source 1..20: mol_type = other RNA
gcctcccgggttcatgccat

SEQ ID NO: 11723 - RNA, 20 nt, synthetic construct
  misc_feature 1..20: note = spacer sequence
  source 1..20: mol_type = other RNA
ctgcaagctccgcctcccgg

SEQ ID NO: 11724 - RNA, 20 nt, synthetic construct
  misc_feature 1..20: note = spacer sequence
  source 1..20: mol_type = other RNA
gctcactgcaagctccgcct

SEQ ID NO: 11725 - RNA, 20 nt, synthetic construct
  misc_feature 1..20: note = spacer sequence
  source 1..20: mol_type = other RNA
cggctcactgcaagctccgc

SEQ ID NO: 11726 - RNA, 20 nt, synthetic construct
  misc_feature 1..20: note = spacer sequence
  source 1..20: mol_type = other RNA
cactactgcactttagcctg

SEQ ID NO: 11727 - RNA, 20 nt, synthetic construct
  misc_feature 1..20: note = spacer sequence
  source 1..20: mol_type = other RNA
gttgcccaggctaaagtgca

SEQ ID NO: 11728 - RNA, 20 nt, synthetic construct
  misc_feature 1..20: note = spacer sequence
  source 1..20: mol_type = other RNA
gtctcaaaaaaaaaaaaaaa

SEQ ID NO: 11729 - RNA, 20 nt, synthetic construct
  misc_feature 1..20: note = spacer sequence
  source 1..20: mol_type = other RNA
caaaaaaaaaaaaaaattct

SEQ ID NO: 11730 - RNA, 20 nt, synthetic construct
  misc_feature 1..20: note = spacer sequence
  source 1..20: mol_type = other RNA
aaaaaaaaaaaaaattctcc

SEQ ID NO: 11731 - RNA, 20 nt, synthetic construct
  misc_feature 1..20: note = spacer sequence
  source 1..20: mol_type = other RNA
cctctcttggtaagttaggg

SEQ ID NO: 11732 - RNA, 20 nt, synthetic construct
  misc_feature 1..20: note = spacer sequence
  source 1..20: mol_type = other RNA
tctcttggtaagttagggta

SEQ ID NO: 11733 - RNA, 20 nt, synthetic construct
  misc_feature 1..20: note = spacer sequence
  source 1..20: mol_type = other RNA
cttggtaagttagggtataa

SEQ ID NO: 11734 - RNA, 20 nt, synthetic construct
  misc_feature 1..20: note = spacer sequence
  source 1..20: mol_type = other RNA
tggtaagttagggtataaga

SEQ ID NO: 11735 - RNA, 20 nt, synthetic construct
  misc_feature 1..20: note = spacer sequence
  source 1..20: mol_type = other RNA
tataccctaacttaccaaga

SEQ ID NO: 11736 - RNA, 20 nt, synthetic construct
  misc_feature 1..20: note = spacer sequence
  source 1..20: mol_type = other RNA
gcagcttatcttatacccta

SEQ ID NO: 11737 - RNA, 20 nt, synthetic construct
  misc_feature 1..20: note = spacer sequence
  source 1..20: mol_type = other RNA
ctttgtttcagcagcttatc

SEQ ID NO: 11738 - RNA, 20 nt, synthetic construct
  misc_feature 1..20: note = spacer sequence
  source 1..20: mol_type = other RNA
ctctcaggtaatgctcaaga

SEQ ID NO: 11739 - RNA, 20 nt, synthetic construct
  misc_feature 1..20: note = spacer sequence
  source 1..20: mol_type = other RNA
ctcaggtaatgctcaagaag

SEQ ID NO: 11740 - RNA, 20 nt, synthetic construct
  misc_feature 1..20: note = spacer sequence
  source 1..20: mol_type = other RNA
caggtaatgctcaagaagtg

SEQ ID NO: 11741 - RNA, 20 nt, synthetic construct
  misc_feature 1..20: note = spacer sequence
  source 1..20: mol_type = other RNA
ggtaatgctcaagaagtgag

SEQ ID NO: 11742 - RNA, 20 nt, synthetic construct
  misc_feature 1..20: note = spacer sequence
  source 1..20: mol_type = other RNA
agaagtgagcagtccagagc

SEQ ID NO: 11743 - RNA, 20 nt, synthetic construct
  misc_feature 1..20: note = spacer sequence
  source 1..20: mol_type = other RNA
tgagcattacctgagagaga

SEQ ID NO: 11744 - RNA, 20 nt, synthetic construct
  misc_feature 1..20: note = spacer sequence
  source 1..20: mol_type = other RNA
cttcttgagcattacctgag

SEQ ID NO: 11745 - RNA, 20 nt, synthetic construct
  misc_feature 1..20: note = spacer sequence
  source 1..20: mol_type = other RNA
agagctggtgaggtgattct

SEQ ID NO: 11746 - RNA, 20 nt, synthetic construct
  misc_feature 1..20: note = spacer sequence
  source 1..20: mol_type = other RNA
ggactgctcacttcttgagc

SEQ ID NO: 11747 - RNA, 20 nt, synthetic construct
  misc_feature 1..20: note = spacer sequence
  source 1..20: mol_type = other RNA
ccagctctggactgctcact

SEQ ID NO: 11748 - RNA, 20 nt, synthetic construct
  misc_feature 1..20: note = spacer sequence
  source 1..20: mol_type = other RNA
cctcaccagctctggactgc

SEQ ID NO: 11749 - RNA, 20 nt, synthetic construct
  misc_feature 1..20: note = spacer sequence
  source 1..20: mol_type = other RNA
gccatccccaacatgtgaac

SEQ ID NO: 11750 - RNA, 20 nt, synthetic construct
  misc_feature 1..20: note = spacer sequence
  source 1..20: mol_type = other RNA
ccaacatgtgaactccaggg

SEQ ID NO: 11751 - RNA, 20 nt, synthetic construct
  misc_feature 1..20: note = spacer sequence
  source 1..20: mol_type = other RNA
catgttggggatggcagaat

SEQ ID NO: 11752 - RNA, 20 nt, synthetic construct
  misc_feature 1..20: note = spacer sequence
  source 1..20: mol_type = other RNA
agggtgactttgccatttgt

SEQ ID NO: 11753 - RNA, 20 nt, synthetic construct
  misc_feature 1..20: note = spacer sequence
  source 1..20: mol_type = other RNA
ccctggagttcacatgttgg

SEQ ID NO: 11754 - RNA, 20 nt, synthetic construct
  misc_feature 1..20: note = spacer sequence
  source 1..20: mol_type = other RNA
tgattttctagccacaggat

SEQ ID NO: 11755 - RNA, 20 nt, synthetic construct
  misc_feature 1..20: note = spacer sequence
  source 1..20: mol_type = other RNA
tgacaaatggcaaagtcacc

SEQ ID NO: 11756 - RNA, 20 nt, synthetic construct
  misc_feature 1..20: note = spacer sequence
  source 1..20: mol_type = other RNA
agccacaggatggagaaaga

SEQ ID NO: 11757 - RNA, 20 nt, synthetic construct
  misc_feature 1..20: note = spacer sequence
  source 1..20: mol_type = other RNA
tgtggctagaaaatcatgac

SEQ ID NO: 11758 - RNA, 20 nt, synthetic construct
  misc_feature 1..20: note = spacer sequence
  source 1..20: mol_type = other RNA
atcctgtggctagaaaatca

SEQ ID NO: 11759 - RNA, 20 nt, synthetic construct
  misc_feature 1..20: note = spacer sequence
  source 1..20: mol_type = other RNA
ccatcctgtggctagaaaat

SEQ ID NO: 11760 - RNA, 20 nt, synthetic construct
  misc_feature 1..20: note = spacer sequence
  source 1..20: mol_type = other RNA
ttctccatcctgtggctaga

SEQ ID NO: 11761 - RNA, 20 nt, synthetic construct
  misc_feature 1..20: note = spacer sequence
  source 1..20: mol_type = other RNA
tctttctccatcctgtggct

SEQ ID NO: 11762 - RNA, 20 nt, synthetic construct
  misc_feature 1..20: note = spacer sequence
  source 1..20: mol_type = other RNA
acttcctctttctccatcct

SEQ ID NO: 11763 - RNA, 20 nt, synthetic construct
  misc_feature 1..20: note = spacer sequence
  source 1..20: mol_type = other RNA
attttaggatgttacatact

SEQ ID NO: 11764 - RNA, 20 nt, synthetic construct
  misc_feature 1..20: note = spacer sequence
  source 1..20: mol_type = other RNA
taaaatggaaactgcaggcc

SEQ ID NO: 11765 - RNA, 20 nt, synthetic construct
  misc_feature 1..20: note = spacer sequence
  source 1..20: mol_type = other RNA
tgttcactcatatcccattg

SEQ ID NO: 11766 - RNA, 20 nt, synthetic construct
  misc_feature 1..20: note = spacer sequence
  source 1..20: mol_type = other RNA
ctcatatcccattggtcaga

SEQ ID NO: 11767 - RNA, 20 nt, synthetic construct
  misc_feature 1..20: note = spacer sequence
  source 1..20: mol_type = other RNA
tatcccattggtcagagctt

SEQ ID NO: 11768 - RNA, 20 nt, synthetic construct
  misc_feature 1..20: note = spacer sequence
  source 1..20: mol_type = other RNA
cattggtcagagcttggtca

SEQ ID NO: 11769 - RNA, 20 nt, synthetic construct
  misc_feature 1..20: note = spacer sequence
  source 1..20: mol_type = other RNA
gagcttggtcacagggccat

SEQ ID NO: 11770 - RNA, 20 nt, synthetic construct
  misc_feature 1..20: note = spacer sequence
  source 1..20: mol_type = other RNA
gaccaatgggatatgagtga

SEQ ID NO: 11771 - RNA, 20 nt, synthetic construct
  misc_feature 1..20: note = spacer sequence
  source 1..20: mol_type = other RNA
cagggccatgcaaggtgcag

SEQ ID NO: 11772 - RNA, 20 nt, synthetic construct
  misc_feature 1..20: note = spacer sequence
  source 1..20: mol_type = other RNA
cctgcaccttgcatggccct

SEQ ID NO: 11773 - RNA, 20 nt, synthetic construct
  misc_feature 1..20: note = spacer sequence
  source 1..20: mol_type = other RNA
cagcctcccctgcaccttgc

SEQ ID NO: 11774 - RNA, 20 nt, synthetic construct
  misc_feature 1..20: note = spacer sequence
  source 1..20: mol_type = other RNA
aaaaatacctttcccagcct

SEQ ID NO: 11775 - RNA, 20 nt, synthetic construct
  misc_feature 1..20: note = spacer sequence
  source 1..20: mol_type = other RNA
ggtccaaaaatacctttccc

SEQ ID NO: 11776 - RNA, 20 nt, synthetic construct
  misc_feature 1..20: note = spacer sequence
  source 1..20: mol_type = other RNA
tccggtccaaaaataccttt

SEQ ID NO: 11777 - RNA, 20 nt, synthetic construct
  misc_feature 1..20: note = spacer sequence
  source 1..20: mol_type = other RNA
tgctgaatctcagaaaactt

SEQ ID NO: 11778 - RNA, 20 nt, synthetic construct
  misc_feature 1..20: note = spacer sequence
  source 1..20: mol_type = other RNA
gcaagatacatggtcatccg

SEQ ID NO: 11779 - RNA, 20 nt, synthetic construct
  misc_feature 1..20: note = spacer sequence
  source 1..20: mol_type = other RNA
cagaaaacttctattattaa

SEQ ID NO: 11780 - RNA, 20 nt, synthetic construct
  misc_feature 1..20: note = spacer sequence
  source 1..20: mol_type = other RNA
gaaaacttctattattaaag

SEQ ID NO: 11781 - RNA, 20 nt, synthetic construct
  misc_feature 1..20: note = spacer sequence
  source 1..20: mol_type = other RNA
gagattcagcaagatacatg

SEQ ID NO: 11782 - RNA, 20 nt, synthetic construct
  misc_feature 1..20: note = spacer sequence
  source 1..20: mol_type = other RNA
attattaaaggtactaaagt

SEQ ID NO: 11783 - RNA, 20 nt, synthetic construct
  misc_feature 1..20: note = spacer sequence
  source 1..20: mol_type = other RNA
gaatggatatgggaggaaaa

SEQ ID NO: 11784 - RNA, 20 nt, synthetic construct
  misc_feature 1..20: note = spacer sequence
  source 1..20: mol_type = other RNA
gactttagtacctttaataa

SEQ ID NO: 11785 - RNA, 20 nt, synthetic construct
  misc_feature 1..20: note = spacer sequence
  source 1..20: mol_type = other RNA
attcagactttagtaccttt

SEQ ID NO: 11786 - RNA, 20 nt, synthetic construct
  misc_feature 1..20: note = spacer sequence
  source 1..20: mol_type = other RNA
catatccattcagactttag

SEQ ID NO: 11787 - RNA, 20 nt, synthetic construct
  misc_feature 1..20: note = spacer sequence
  source 1..20: mol_type = other RNA
tcccatatccattcagactt

SEQ ID NO: 11788 - RNA, 20 nt, synthetic construct
  misc_feature 1..20: note = spacer sequence
  source 1..20: mol_type = other RNA
ttaatcttcaccatggctgt

SEQ ID NO: 11789 - RNA, 20 nt, synthetic construct
  misc_feature 1..20: note = spacer sequence
  source 1..20: mol_type = other RNA
tcaccatggctgtcttttgc

SEQ ID NO: 11790 - RNA, 20 nt, synthetic construct
  misc_feature 1..20: note = spacer sequence
  source 1..20: mol_type = other RNA
ccatggctgtcttttgccaa

SEQ ID NO: 11791 - RNA, 20 nt, synthetic construct
  misc_feature 1..20: note = spacer sequence
  source 1..20: mol_type = other RNA
tttgccaagagcccaataag

SEQ ID NO: 11792 - RNA, 20 nt, synthetic construct
  misc_feature 1..20: note = spacer sequence
  source 1..20: mol_type = other RNA
tggcaaaagacagccatggt

SEQ ID NO: 11793 - RNA, 20 nt, synthetic construct
  misc_feature 1..20: note = spacer sequence
  source 1..20: mol_type = other RNA
ccacccaaatctcatcttga

SEQ ID NO: 11794 - RNA, 20 nt, synthetic construct
  misc_feature 1..20: note = spacer sequence
  source 1..20: mol_type = other RNA
catcttgaattgtagctcct

SEQ ID NO: 11795 - RNA, 20 nt, synthetic construct
  misc_feature 1..20: note = spacer sequence
  source 1..20: mol_type = other RNA
tcttgaattgtagctcctat

SEQ ID NO: 11796 - RNA, 20 nt, synthetic construct
  misc_feature 1..20: note = spacer sequence
  source 1..20: mol_type = other RNA
tgaattgtagctcctataat

SEQ ID NO: 11797 - RNA, 20 nt, synthetic construct
  misc_feature 1..20: note = spacer sequence
  source 1..20: mol_type = other RNA
agatgagatttgggtgggga

SEQ ID NO: 11798 - RNA, 20 nt, synthetic construct
  misc_feature 1..20: note = spacer sequence
  source 1..20: mol_type = other RNA
tataattcccacgtactgtg

SEQ ID NO: 11799 - RNA, 20 nt, synthetic construct
  misc_feature 1..20: note = spacer sequence
  source 1..20: mol_type = other RNA
cacgtactgtggaagggacc

SEQ ID NO: 11800 - RNA, 20 nt, synthetic construct
  misc_feature 1..20: note = spacer sequence
  source 1..20: mol_type = other RNA
acagtacgtgggaattatag

SEQ ID NO: 11801 - RNA, 20 nt, synthetic construct
  misc_feature 1..20: note = spacer sequence
  source 1..20: mol_type = other RNA
cttccacagtacgtgggaat

SEQ ID NO: 11802 - RNA, 20 nt, synthetic construct
  misc_feature 1..20: note = spacer sequence
  source 1..20: mol_type = other RNA
caccaggtcccttccacagt

SEQ ID NO: 11803 - RNA, 20 nt, synthetic construct
  misc_feature 1..20: note = spacer sequence
  source 1..20: mol_type = other RNA
cccaccaggtcccttccaca

SEQ ID NO: 11804 - RNA, 20 nt, synthetic construct
  misc_feature 1..20: note = spacer sequence
  source 1..20: mol_type = other RNA
aattatctcccaccaggtcc

SEQ ID NO: 11805 - RNA, 20 nt, synthetic construct
  misc_feature 1..20: note = spacer sequence
  source 1..20: mol_type = other RNA
tgggggcaggtctttcccgt

SEQ ID NO: 11806 - RNA, 20 nt, synthetic construct
  misc_feature 1..20: note = spacer sequence
  source 1..20: mol_type = other RNA
ttcccgtgctattcttgtga

SEQ ID NO: 11807 - RNA, 20 nt, synthetic construct
  misc_feature 1..20: note = spacer sequence
  source 1..20: mol_type = other RNA
cgtgctattcttgtgatagt

SEQ ID NO: 11808 - RNA, 20 nt, synthetic construct
  misc_feature 1..20: note = spacer sequence
  source 1..20: mol_type = other RNA
tgtgatagtgaataagtctc

SEQ ID NO: 11809 - RNA, 20 nt, synthetic construct
  misc_feature 1..20: note = spacer sequence
  source 1..20: mol_type = other RNA
caagaatagcacgggaaaga

SEQ ID NO: 11810 - RNA, 20 nt, synthetic construct
  misc_feature 1..20: note = spacer sequence
  source 1..20: mol_type = other RNA
ctatcacaagaatagcacgg

SEQ ID NO: 11811 - RNA, 20 nt, synthetic construct
  misc_feature 1..20: note = spacer sequence
  source 1..20: mol_type = other RNA
cacaagatttgatagttttg

SEQ ID NO: 11812 - RNA, 20 nt, synthetic construct
  misc_feature 1..20: note = spacer sequence
  source 1..20: mol_type = other RNA
caagatttgatagttttgta

SEQ ID NO: 11813 - RNA, 20 nt, synthetic construct
  misc_feature 1..20: note = spacer sequence
  source 1..20: mol_type = other RNA
tgtgagacttattcactatc

SEQ ID NO: 11814 - RNA, 20 nt, synthetic construct
  misc_feature 1..20: note = spacer sequence
  source 1..20: mol_type = other RNA
aatcttgtgagacttattca

SEQ ID NO: 11815 - RNA, 20 nt, synthetic construct
  misc_feature 1..20: note = spacer sequence
  source 1..20: mol_type = other RNA
cctttacaaaactatcaaat

SEQ ID NO: 11816 - RNA, 20 nt, synthetic construct
  misc_feature 1..20: note = spacer sequence
  source 1..20: mol_type = other RNA
tttgccatcaccaaattact

SEQ ID NO: 11817 - RNA, 20 nt, synthetic construct
  misc_feature 1..20: note = spacer sequence
  source 1..20: mol_type = other RNA
ccaaattactgacctggaat

SEQ ID NO: 11818 - RNA, 20 nt, synthetic construct
  misc_feature 1..20: note = spacer sequence
  source 1..20: mol_type = other RNA
gtaatttggtgatggcaaaa

SEQ ID NO: 11819 - RNA, 20 nt, synthetic construct
  misc_feature 1..20: note = spacer sequence
  source 1..20: mol_type = other RNA
aggtcagtaatttggtgatg

SEQ ID NO: 11820 - RNA, 20 nt, synthetic construct
  misc_feature 1..20: note = spacer sequence
  source 1..20: mol_type = other RNA
tactgccttctatcctacct

SEQ ID NO: 11821 - RNA, 20 nt, synthetic construct
  misc_feature 1..20: note = spacer sequence
  source 1..20: mol_type = other RNA
atcctacctcttctgctcag

SEQ ID NO: 11822 - RNA, 20 nt, synthetic construct
  misc_feature 1..20: note = spacer sequence
  source 1..20: mol_type = other RNA
tacctcttctgctcagccaa

SEQ ID NO: 11823 - RNA, 20 nt, synthetic construct
  misc_feature 1..20: note = spacer sequence
  source 1..20: mol_type = other RNA
tctgctcagccaattaatat

SEQ ID NO: 11824 - RNA, 20 nt, synthetic construct
  misc_feature 1..20: note = spacer sequence
  source 1..20: mol_type = other RNA
gctcagccaattaatatttt

SEQ ID NO: 11825 - RNA, 20 nt, synthetic construct
  misc_feature 1..20: note = spacer sequence
  source 1..20: mol_type = other RNA
gccaattaatattttagagt

SEQ ID NO: 11826 - RNA, 20 nt, synthetic construct
  misc_feature 1..20: note = spacer sequence
  source 1..20: mol_type = other RNA
cgcctgtaatcccagcactt

SEQ ID NO: 11827 - RNA, 20 nt, synthetic construct
  misc_feature 1..20: note = spacer sequence
  source 1..20: mol_type = other RNA
tatctatttcaaagtgtgaa

SEQ ID NO: 11828 - RNA, 20 nt, synthetic construct
  misc_feature 1..20: note = spacer sequence
  source 1..20: mol_type = other RNA
atttcaaagtgtgaatcagg

SEQ ID NO: 11829 - RNA, 20 nt, synthetic construct
  misc_feature 1..20: note = spacer sequence
  source 1..20: mol_type = other RNA
aagtgtgaatcaggagagag

SEQ ID NO: 11830 - RNA, 20 nt, synthetic construct
  misc_feature 1..20: note = spacer sequence
  source 1..20: mol_type = other RNA
cactttgaaatagatacgat

SEQ ID NO: 11831 - RNA, 20 nt, synthetic construct
  misc_feature 1..20: note = spacer sequence
  source 1..20: mol_type = other RNA
ggagagagggtggtatctgc

SEQ ID NO: 11832 - RNA, 20 nt, synthetic construct
  misc_feature 1..20: note = spacer sequence
  source 1..20: mol_type = other RNA
tgattcacactttgaaatag

SEQ ID NO: 11833 - RNA, 20 nt, synthetic construct
  misc_feature 1..20: note = spacer sequence
  source 1..20: mol_type = other RNA
cctgattcacactttgaaat

SEQ ID NO: 11834 - RNA, 20 nt, synthetic construct
  misc_feature 1..20: note = spacer sequence
  source 1..20: mol_type = other RNA
ctcctgattcacactttgaa

SEQ ID NO: 11835 - RNA, 20 nt, synthetic construct
  misc_feature 1..20: note = spacer sequence
  source 1..20: mol_type = other RNA
gctgcgtctgctccttactt

SEQ ID NO: 11836 - RNA, 20 nt, synthetic construct
  misc_feature 1..20: note = spacer sequence
  source 1..20: mol_type = other RNA
gctccttacttacgtaaaga

SEQ ID NO: 11837 - RNA, 20 nt, synthetic construct
  misc_feature 1..20: note = spacer sequence
  source 1..20: mol_type = other RNA
ttacttacgtaaagaaagga

SEQ ID NO: 11838 - RNA, 20 nt, synthetic construct
  misc_feature 1..20: note = spacer sequence
  source 1..20: mol_type = other RNA
ttacgtaagtaaggagcaga

SEQ ID NO: 11839 - RNA, 20 nt, synthetic construct
  misc_feature 1..20: note = spacer sequence
  source 1..20: mol_type = other RNA
tttctttacgtaagtaagga

SEQ ID NO: 11840 - RNA, 20 nt, synthetic construct
  misc_feature 1..20: note = spacer sequence
  source 1..20: mol_type = other RNA
aaaggaaagttgctcatatt

SEQ ID NO: 11841 - RNA, 20 nt, synthetic construct
  misc_feature 1..20: note = spacer sequence
  source 1..20: mol_type = other RNA
cttgttctaaaggaaagttg

SEQ ID NO: 11842 - RNA, 20 nt, synthetic construct
  misc_feature 1..20: note = spacer sequence
  source 1..20: mol_type = other RNA
ttgccttctatctgaacaag

SEQ ID NO: 11843 - RNA, 20 nt, synthetic construct
  misc_feature 1..20: note = spacer sequence
  source 1..20: mol_type = other RNA
atctgaacaagtaagttcta

SEQ ID NO: 11844 - RNA, 20 nt, synthetic construct
  misc_feature 1..20: note = spacer sequence
  source 1..20: mol_type = other RNA
gaacaagtaagttctattag

SEQ ID NO: 11845 - RNA, 20 nt, synthetic construct
  misc_feature 1..20: note = spacer sequence
  source 1..20: mol_type = other RNA
gatagaaggcaaagatccct

SEQ ID NO: 11846 - RNA, 20 nt, synthetic construct
  misc_feature 1..20: note = spacer sequence
  source 1..20: mol_type = other RNA
attagcaagggagaacaggg

SEQ ID NO: 11847 - RNA, 20 nt, synthetic construct
  misc_feature 1..20: note = spacer sequence
  source 1..20: mol_type = other RNA
cttgctaatagaacttactt

SEQ ID NO: 11848 - RNA, 20 nt, synthetic construct
  misc_feature 1..20: note = spacer sequence
  source 1..20: mol_type = other RNA
cccttgctaatagaacttac

SEQ ID NO: 11849 - RNA, 20 nt, synthetic construct
  misc_feature 1..20: note = spacer sequence
  source 1..20: mol_type = other RNA
ctgttctcccttgctaatag

SEQ ID NO: 11850 - RNA, 20 nt, synthetic construct
  misc_feature 1..20: note = spacer sequence
  source 1..20: mol_type = other RNA
tccctgttctcccttgctaa

SEQ ID NO: 11851 - RNA, 20 nt, synthetic construct
  misc_feature 1..20: note = spacer sequence
  source 1..20: mol_type = other RNA
ttcttccctgttctcccttg

SEQ ID NO: 11852 - RNA, 20 nt, synthetic construct
  misc_feature 1..20: note = spacer sequence
  source 1..20: mol_type = other RNA
agatgttagaattgcactag

SEQ ID NO: 11853 - RNA, 20 nt, synthetic construct
  misc_feature 1..20: note = spacer sequence
  source 1..20: mol_type = other RNA
tcttctttttgttttaaagt

SEQ ID NO: 11854 - RNA, 20 nt, synthetic construct
  misc_feature 1..20: note = spacer sequence
  source 1..20: mol_type = other RNA
tctttttgttttaaagtccc

SEQ ID NO: 11855 - RNA, 20 nt, synthetic construct
  misc_feature 1..20: note = spacer sequence
  source 1..20: mol_type = other RNA
ttttgttttaaagtcccagc

SEQ ID NO: 11856 - RNA, 20 nt, synthetic construct
  misc_feature 1..20: note = spacer sequence
  source 1..20: mol_type = other RNA
cagcatatgaaaagtagaaa

SEQ ID NO: 11857 - RNA, 20 nt, synthetic construct
  misc_feature 1..20: note = spacer sequence
  source 1..20: mol_type = other RNA
tatgctgggactttaaaaca

SEQ ID NO: 11858 - RNA, 20 nt, synthetic construct
  misc_feature 1..20: note = spacer sequence
  source 1..20: mol_type = other RNA
acttttcatatgctgggact

SEQ ID NO: 11859 - RNA, 20 nt, synthetic construct
  misc_feature 1..20: note = spacer sequence
  source 1..20: mol_type = other RNA
ttaactatttttctactttt

SEQ ID NO: 11860 - RNA, 20 nt, synthetic construct
  misc_feature 1..20: note = spacer sequence
  source 1..20: mol_type = other RNA
agtagcctccttaactattt

SEQ ID NO: 11861 - RNA, 20 nt, synthetic construct
  misc_feature 1..20: note = spacer sequence
  source 1..20: mol_type = other RNA
ctagtagcctccttaactat

SEQ ID NO: 11862 - RNA, 20 nt, synthetic construct
  misc_feature 1..20: note = spacer sequence
  source 1..20: mol_type = other RNA
gctgttacctctagttgctg

SEQ ID NO: 11863 - RNA, 20 nt, synthetic construct
  misc_feature 1..20: note = spacer sequence
  source 1..20: mol_type = other RNA
acatgtcagctgttacctct

SEQ ID NO: 11864 - RNA, 20 nt, synthetic construct
  misc_feature 1..20: note = spacer sequence
  source 1..20: mol_type = other RNA
ctgtcaacatgtcagctgtt

SEQ ID NO: 11865 - RNA, 20 nt, synthetic construct
  misc_feature 1..20: note = spacer sequence
  source 1..20: mol_type = other RNA
tcactgtcaacatgtcagct

SEQ ID NO: 11866 - RNA, 20 nt, synthetic construct
  misc_feature 1..20: note = spacer sequence
  source 1..20: mol_type = other RNA
tcttcactgtcaacatgtca

SEQ ID NO: 11867 - RNA, 20 nt, synthetic construct
  misc_feature 1..20: note = spacer sequence
  source 1..20: mol_type = other RNA
ataggaagcagacacaagaa

SEQ ID NO: 11868 - RNA, 20 nt, synthetic construct
  misc_feature 1..20: note = spacer sequence
  source 1..20: mol_type = other RNA
tatagatggctgtcttcttc

SEQ ID NO: 11869 - RNA, 20 nt, synthetic construct
  misc_feature 1..20: note = spacer sequence
  source 1..20: mol_type = other RNA
gcttcctatagatggctgtc

SEQ ID NO: 11870 - RNA, 20 nt, synthetic construct
  misc_feature 1..20: note = spacer sequence
  source 1..20: mol_type = other RNA
tgtgtctgcttcctatagat

SEQ ID NO: 11871 - RNA, 20 nt, synthetic construct
  misc_feature 1..20: note = spacer sequence
  source 1..20: mol_type = other RNA
ttgtgtgttcttgtgtctgc

SEQ ID NO: 11872 - RNA, 20 nt, synthetic construct
  misc_feature 1..20: note = spacer sequence
  source 1..20: mol_type = other RNA
tgtgtatgttctttgtgtgt

SEQ ID NO: 11873 - RNA, 20 nt, synthetic construct
  misc_feature 1..20: note = spacer sequence
  source 1..20: mol_type = other RNA
tgtgtgttcttgtgtatgtt

SEQ ID NO: 11874 - RNA, 20 nt, synthetic construct
  misc_feature 1..20: note = spacer sequence
  source 1..20: mol_type = other RNA
atagacagcaatctatagga

SEQ ID NO: 11875 - RNA, 20 nt, synthetic construct
  misc_feature 1..20: note = spacer sequence
  source 1..20: mol_type = other RNA
atagatcgtgtgtgttcttg

SEQ ID NO: 11876 - RNA, 20 nt, synthetic construct
  misc_feature 1..20: note = spacer sequence
  source 1..20: mol_type = other RNA
ataggaagcagacgaaagaa

SEQ ID NO: 11877 - RNA, 20 nt, synthetic construct
  misc_feature 1..20: note = spacer sequence
  source 1..20: mol_type = other RNA
tatagattgctgtctataga

SEQ ID NO: 11878 - RNA, 20 nt, synthetic construct
  misc_feature 1..20: note = spacer sequence
  source 1..20: mol_type = other RNA
ataacccccggtggcactgg

SEQ ID NO: 11879 - RNA, 20 nt, synthetic construct
  misc_feature 1..20: note = spacer sequence
  source 1..20: mol_type = other RNA
caacaaggctgctatacaca

SEQ ID NO: 11880 - RNA, 20 nt, synthetic construct
  misc_feature 1..20: note = spacer sequence
  source 1..20: mol_type = other RNA
ggccccagtgaatgaggaat

SEQ ID NO: 11881 - RNA, 20 nt, synthetic construct
  misc_feature 1..20: note = spacer sequence
  source 1..20: mol_type = other RNA
ctggggcctgatgtgtatag

SEQ ID NO: 11882 - RNA, 20 nt, synthetic construct
  misc_feature 1..20: note = spacer sequence
  source 1..20: mol_type = other RNA
gttctatcacacaccgcctt

SEQ ID NO: 11883 - RNA, 20 nt, synthetic construct
  misc_feature 1..20: note = spacer sequence
  source 1..20: mol_type = other RNA
tctgttctatcacacaccgc

SEQ ID NO: 11884 - RNA, 20 nt, synthetic construct
  misc_feature 1..20: note = spacer sequence
  source 1..20: mol_type = other RNA
tccttgtgactttcaaggca

SEQ ID NO: 11885 - RNA, 20 nt, synthetic construct
  misc_feature 1..20: note = spacer sequence
  source 1..20: mol_type = other RNA
ttgtgactttcaaggcacaa

SEQ ID NO: 11886 - RNA, 20 nt, synthetic construct
  misc_feature 1..20: note = spacer sequence
  source 1..20: mol_type = other RNA
caaggatgaactgggcatag

SEQ ID NO: 11887 - RNA, 20 nt, synthetic construct
  misc_feature 1..20: note = spacer sequence
  source 1..20: mol_type = other RNA
aggcacaactttcagctctc

SEQ ID NO: 11888 - RNA, 20 nt, synthetic construct
  misc_feature 1..20: note = spacer sequence
  source 1..20: mol_type = other RNA
gctctcagctggatgccaca

SEQ ID NO: 11889 - RNA, 20 nt, synthetic construct
  misc_feature 1..20: note = spacer sequence
  source 1..20: mol_type = other RNA
cagctggatgccacatctgg

SEQ ID NO: 11890 - RNA, 20 nt, synthetic construct
  misc_feature 1..20: note = spacer sequence
  source 1..20: mol_type = other RNA
gctggatgccacatctggac

SEQ ID NO: 11891 - RNA, 20 nt, synthetic construct
  misc_feature 1..20: note = spacer sequence
  source 1..20: mol_type = other RNA
agctgagagctgaaagttgt

SEQ ID NO: 11892 - RNA, 20 nt, synthetic construct
  misc_feature 1..20: note = spacer sequence
  source 1..20: mol_type = other RNA
ctcactgtttggctggaaga

SEQ ID NO: 11893 - RNA, 20 nt, synthetic construct
  misc_feature 1..20: note = spacer sequence
  source 1..20: mol_type = other RNA
ccctcactgtttggctggaa

SEQ ID NO: 11894 - RNA, 20 nt, synthetic construct
  misc_feature 1..20: note = spacer sequence
  source 1..20: mol_type = other RNA
tgtttgggattctgacattc

SEQ ID NO: 11895 - RNA, 20 nt, synthetic construct
  misc_feature 1..20: note = spacer sequence
  source 1..20: mol_type = other RNA
caaacatgacagtgttaaat

SEQ ID NO: 11896 - RNA, 20 nt, synthetic construct
  misc_feature 1..20: note = spacer sequence
  source 1..20: mol_type = other RNA
gacattcttctcttttttga

SEQ ID NO: 11897 - RNA, 20 nt, synthetic construct
  misc_feature 1..20: note = spacer sequence
  source 1..20: mol_type = other RNA
gaatcccaaacatgacagtg

SEQ ID NO: 11898 - RNA, 20 nt, synthetic construct
  misc_feature 1..20: note = spacer sequence
  source 1..20: mol_type = other RNA
tctcttttttgagagagaga

SEQ ID NO: 11899 - RNA, 20 nt, synthetic construct
  misc_feature 1..20: note = spacer sequence
  source 1..20: mol_type = other RNA
cttttttgagagagagagac

SEQ ID NO: 11900 - RNA, 20 nt, synthetic construct
  misc_feature 1..20: note = spacer sequence
  source 1..20: mol_type = other RNA
tttttgagagagagagacag

SEQ ID NO: 11901 - RNA, 20 nt, synthetic construct
  misc_feature 1..20: note = spacer sequence
  source 1..20: mol_type = other RNA
aaaaagagaagaatgtcaga

SEQ ID NO: 11902 - RNA, 20 nt, synthetic construct
  misc_feature 1..20: note = spacer sequence
  source 1..20: mol_type = other RNA
caaaaaagagaagaatgtca

SEQ ID NO: 11903 - RNA, 20 nt, synthetic construct
  misc_feature 1..20: note = spacer sequence
  source 1..20: mol_type = other RNA
ctcaaaaaagagaagaatgt

SEQ ID NO: 11904 - RNA, 20 nt, synthetic construct
  misc_feature 1..20: note = spacer sequence
  source 1..20: mol_type = other RNA
ctctcaaaaaagagaagaat

SEQ ID NO: 11905 - RNA, 20 nt, synthetic construct
  misc_feature 1..20: note = spacer sequence
  source 1..20: mol_type = other RNA
ctctctcaaaaaagagaaga

SEQ ID NO: 11906 - RNA, 20 nt, synthetic construct
  misc_feature 1..20: note = spacer sequence
  source 1..20: mol_type = other RNA
ctctctctcaaaaaagagaa

SEQ ID NO: 11907 - RNA, 20 nt, synthetic construct
  misc_feature 1..20: note = spacer sequence
  source 1..20: mol_type = other RNA
tactctgttgcccaggctgt

SEQ ID NO: 11908 - RNA, 20 nt, synthetic construct
  misc_feature 1..20: note = spacer sequence
  source 1..20: mol_type = other RNA
gttgcccaggctgtagtgca

SEQ ID NO: 11909 - RNA, 20 nt, synthetic construct
  misc_feature 1..20: note = spacer sequence
  source 1..20: mol_type = other RNA
cggcactttgggaggctgag

SEQ ID NO: 11910 - RNA, 20 nt, synthetic construct
  misc_feature 1..20: note = spacer sequence
  source 1..20: mol_type = other RNA
tgcctgtaatcccggcactt

SEQ ID NO: 11911 - RNA, 20 nt, synthetic construct
  misc_feature 1..20: note = spacer sequence
  source 1..20: mol_type = other RNA
ttttttgtagagacagggtc

SEQ ID NO: 11912 - RNA, 20 nt, synthetic construct
  misc_feature 1..20: note = spacer sequence
  source 1..20: mol_type = other RNA
acaaaaaaagaaaaaattgg

SEQ ID NO: 11913 - RNA, 20 nt, synthetic construct
  misc_feature 1..20: note = spacer sequence
  source 1..20: mol_type = other RNA
ctacaaaaaaagaaaaaatt

SEQ ID NO: 11914 - RNA, 20 nt, synthetic construct
  misc_feature 1..20: note = spacer sequence
  source 1..20: mol_type = other RNA
ttctgtgttgtccaggcttg

SEQ ID NO: 11915 - RNA, 20 nt, synthetic construct
  misc_feature 1..20: note = spacer sequence
  source 1..20: mol_type = other RNA
gtgttgtccaggcttggtct

SEQ ID NO: 11916 - RNA, 20 nt, synthetic construct
  misc_feature 1..20: note = spacer sequence
  source 1..20: mol_type = other RNA
aggcttggtctcaaactcct

SEQ ID NO: 11917 - RNA, 20 nt, synthetic construct
  misc_feature 1..20: note = spacer sequence
  source 1..20: mol_type = other RNA
caaactcctggcctcaagag

SEQ ID NO: 11918 - RNA, 20 nt, synthetic construct
  misc_feature 1..20: note = spacer sequence
  source 1..20: mol_type = other RNA
aactcctggcctcaagagat

SEQ ID NO: 11919 - RNA, 20 nt, synthetic construct
  misc_feature 1..20: note = spacer sequence
  source 1..20: mol_type = other RNA
tggcctcaagagatcctcca

SEQ ID NO: 11920 - RNA, 20 nt, synthetic construct
  misc_feature 1..20: note = spacer sequence
  source 1..20: mol_type = other RNA
agagatcctccagcctcagt

SEQ ID NO: 11921 - RNA, 20 nt, synthetic construct
  misc_feature 1..20: note = spacer sequence
  source 1..20: mol_type = other RNA
tgaggccaggagtttgagac

SEQ ID NO: 11922 - RNA, 20 nt, synthetic construct
  misc_feature 1..20: note = spacer sequence
  source 1..20: mol_type = other RNA
cttgaggccaggagtttgag

SEQ ID NO: 11923 - RNA, 20 nt, synthetic construct
  misc_feature 1..20: note = spacer sequence
  source 1..20: mol_type = other RNA
tccagcctcagtctcctgaa

SEQ ID NO: 11924 - RNA, 20 nt, synthetic construct
  misc_feature 1..20: note = spacer sequence
  source 1..20: mol_type = other RNA
agcctcagtctcctgaagtg

SEQ ID NO: 11925 - RNA, 20 nt, synthetic construct
  misc_feature 1..20: note = spacer sequence
  source 1..20: mol_type = other RNA
caaacagtttcaatttagta

SEQ ID NO: 11926 - RNA, 20 nt, synthetic construct
  misc_feature 1..20: note = spacer sequence
  source 1..20: mol_type = other RNA
tattaggtcacaaacagttt

SEQ ID NO: 11927 - RNA, 20 nt, synthetic construct
  misc_feature 1..20: note = spacer sequence
  source 1..20: mol_type = other RNA
tctgttccaaggaatgagtg

SEQ ID NO: 11928 - RNA, 20 nt, synthetic construct
  misc_feature 1..20: note = spacer sequence
  source 1..20: mol_type = other RNA
gttccaaggaatgagtggaa

SEQ ID NO: 11929 - RNA, 20 nt, synthetic construct
  misc_feature 1..20: note = spacer sequence
  source 1..20: mol_type = other RNA
aaggaatgagtggaaaaggt

SEQ ID NO: 11930 - RNA, 20 nt, synthetic construct
  misc_feature 1..20: note = spacer sequence
  source 1..20: mol_type = other RNA
ttggaacagatgagtcatat

SEQ ID NO: 11931 - RNA, 20 nt, synthetic construct
  misc_feature 1..20: note = spacer sequence
  source 1..20: mol_type = other RNA
ttccttggaacagatgagtc

SEQ ID NO: 11932 - RNA, 20 nt, synthetic construct
  misc_feature 1..20: note = spacer sequence
  source 1..20: mol_type = other RNA
actcattccttggaacagat

SEQ ID NO: 11933 - RNA, 20 nt, synthetic construct
  misc_feature 1..20: note = spacer sequence
  source 1..20: mol_type = other RNA
caaaccttttccactcattc

SEQ ID NO: 11934 - RNA, 20 nt, synthetic construct
  misc_feature 1..20: note = spacer sequence
  source 1..20: mol_type = other RNA
ggcaggtcccaaaccttttc

SEQ ID NO: 11935 - RNA, 20 nt, synthetic construct
  misc_feature 1..20: note = spacer sequence
  source 1..20: mol_type = other RNA
cagctcatgagaaggccacc

SEQ ID NO: 11936 - RNA, 20 nt, synthetic construct
  misc_feature 1..20: note = spacer sequence
  source 1..20: mol_type = other RNA
tgagaaggccacctccacta

SEQ ID NO: 11937 - RNA, 20 nt, synthetic construct
  misc_feature 1..20: note = spacer sequence
  source 1..20: mol_type = other RNA
tgagctgggaaactctggca

SEQ ID NO: 11938 - RNA, 20 nt, synthetic construct
  misc_feature 1..20: note = spacer sequence
  source 1..20: mol_type = other RNA
catgagctgggaaactctgg

SEQ ID NO: 11939 - RNA, 20 nt, synthetic construct
  misc_feature 1..20: note = spacer sequence
  source 1..20: mol_type = other RNA
actagggagagcttaggggg

SEQ ID NO: 11940 - RNA, 20 nt, synthetic construct
  misc_feature 1..20: note = spacer sequence
  source 1..20: mol_type = other RNA
ctagtggaggtggccttctc

SEQ ID NO: 11941 - RNA, 20 nt, synthetic construct
  misc_feature 1..20: note = spacer sequence
  source 1..20: mol_type = other RNA
agagtgcactgcaacagagt

SEQ ID NO: 11942 - RNA, 20 nt, synthetic construct
  misc_feature 1..20: note = spacer sequence
  source 1..20: mol_type = other RNA
ggagtgcagtggcgcaatct

SEQ ID NO: 11943 - RNA, 20 nt, synthetic construct
  misc_feature 1..20: note = spacer sequence
  source 1..20: mol_type = other RNA
gttgcagtgcactctggagt

SEQ ID NO: 11944 - RNA, 20 nt, synthetic construct
  misc_feature 1..20: note = spacer sequence
  source 1..20: mol_type = other RNA
ctctgttgcagtgcactctg

SEQ ID NO: 11945 - RNA, 20 nt, synthetic construct
  misc_feature 1..20: note = spacer sequence
  source 1..20: mol_type = other RNA
cactctgttgcagtgcactc

SEQ ID NO: 11946 - RNA, 20 nt, synthetic construct
  misc_feature 1..20: note = spacer sequence
  source 1..20: mol_type = other RNA
gtctcaaaaaaaaaaaaaaa

SEQ ID NO: 11947 - RNA, 20 nt, synthetic construct
  misc_feature 1..20: note = spacer sequence
  source 1..20: mol_type = other RNA
caaaaaaaaaaaaaaaagca

SEQ ID NO: 11948 - RNA, 20 nt, synthetic construct
  misc_feature 1..20: note = spacer sequence
  source 1..20: mol_type = other RNA
aaaaaaaaaaaaaaagcaaa

SEQ ID NO: 11949 - RNA, 20 nt, synthetic construct
  misc_feature 1..20: note = spacer sequence
  source 1..20: mol_type = other RNA
tttacggttttttgtttgtt

SEQ ID NO: 11950 - RNA, 20 nt, synthetic construct
  misc_feature 1..20: note = spacer sequence
  source 1..20: mol_type = other RNA
aaaaagtgaaaacatctgaa

SEQ ID NO: 11951 - RNA, 20 nt, synthetic construct
  misc_feature 1..20: note = spacer sequence
  source 1..20: mol_type = other RNA
ctttttggaatatttgcaca

SEQ ID NO: 11952 - RNA, 20 nt, synthetic construct
  misc_feature 1..20: note = spacer sequence
  source 1..20: mol_type = other RNA
gaaatctgagacatttctgg

SEQ ID NO: 11953 - RNA, 20 nt, synthetic construct
  misc_feature 1..20: note = spacer sequence
  source 1..20: mol_type = other RNA
gatgttttcactttttggaa

SEQ ID NO: 11954 - RNA, 20 nt, synthetic construct
  misc_feature 1..20: note = spacer sequence
  source 1..20: mol_type = other RNA
gagacatttctggtcccagg

SEQ ID NO: 11955 - RNA, 20 nt, synthetic construct
  misc_feature 1..20: note = spacer sequence
  source 1..20: mol_type = other RNA
gatttcagatgttttcactt

SEQ ID NO: 11956 - RNA, 20 nt, synthetic construct
  misc_feature 1..20: note = spacer sequence
  source 1..20: mol_type = other RNA
cagatttcagatgttttcac

SEQ ID NO: 11957 - RNA, 20 nt, synthetic construct
  misc_feature 1..20: note = spacer sequence
  source 1..20: mol_type = other RNA
ggtcccaggtatttcacaca

SEQ ID NO: 11958 - RNA, 20 nt, synthetic construct
  misc_feature 1..20: note = spacer sequence
  source 1..20: mol_type = other RNA
caggtatttcacacaagaga

SEQ ID NO: 11959 - RNA, 20 nt, synthetic construct
  misc_feature 1..20: note = spacer sequence
  source 1..20: mol_type = other RNA
cacaagagatattcaacctg

SEQ ID NO: 11960 - RNA, 20 nt, synthetic construct
  misc_feature 1..20: note = spacer sequence
  source 1..20: mol_type = other RNA
tgtgtgaaatacctgggacc

SEQ ID NO: 11961 - RNA, 20 nt, synthetic construct
  misc_feature 1..20: note = spacer sequence
  source 1..20: mol_type = other RNA
cttgtgtgaaatacctggga

SEQ ID NO: 11962 - RNA, 20 nt, synthetic construct
  misc_feature 1..20: note = spacer sequence
  source 1..20: mol_type = other RNA
acctgtattattaagcacat

SEQ ID NO: 11963 - RNA, 20 nt, synthetic construct
  misc_feature 1..20: note = spacer sequence
  source 1..20: mol_type = other RNA
agcatgtgcttaataataca

SEQ ID NO: 11964 - RNA, 20 nt, synthetic construct
  misc_feature 1..20: note = spacer sequence
  source 1..20: mol_type = other RNA
tgctaagcccttttcatgca

SEQ ID NO: 11965 - RNA, 20 nt, synthetic construct
  misc_feature 1..20: note = spacer sequence
  source 1..20: mol_type = other RNA
tgcattacacatgaaacctc

SEQ ID NO: 11966 - RNA, 20 nt, synthetic construct
  misc_feature 1..20: note = spacer sequence
  source 1..20: mol_type = other RNA
tgtgtaatgcatgaaaaggg

SEQ ID NO: 11967 - RNA, 20 nt, synthetic construct
  misc_feature 1..20: note = spacer sequence
  source 1..20: mol_type = other RNA
caaccagcctttactgttaa

SEQ ID NO: 11968 - RNA, 20 nt, synthetic construct
  misc_feature 1..20: note = spacer sequence
  source 1..20: mol_type = other RNA
cagaagaggaaccgaagcaa

SEQ ID NO: 11969 - RNA, 20 nt, synthetic construct
  misc_feature 1..20: note = spacer sequence
  source 1..20: mol_type = other RNA
gtgaaattggcttaacagta

SEQ ID NO: 11970 - RNA, 20 nt, synthetic construct
  misc_feature 1..20: note = spacer sequence
  source 1..20: mol_type = other RNA
tctgtgaaattggcttaaca

SEQ ID NO: 11971 - RNA, 20 nt, synthetic construct
  misc_feature 1..20: note = spacer sequence
  source 1..20: mol_type = other RNA
tcttctgtgaaattggctta

SEQ ID NO: 11972 - RNA, 20 nt, synthetic construct
  misc_feature 1..20: note = spacer sequence
  source 1..20: mol_type = other RNA
gttcctcttctgtgaaattg

SEQ ID NO: 11973 - RNA, 20 nt, synthetic construct
  misc_feature 1..20: note = spacer sequence
  source 1..20: mol_type = other RNA
tttgcttcggttcctcttct

SEQ ID NO: 11974 - RNA, 20 nt, synthetic construct
  misc_feature 1..20: note = spacer sequence
  source 1..20: mol_type = other RNA
ttcctttgcttcggttcctc

SEQ ID NO: 11975 - RNA, 20 nt, synthetic construct
  misc_feature 1..20: note = spacer sequence
  source 1..20: mol_type = other RNA
agaggaagcttgtccaacgc

SEQ ID NO: 11976 - RNA, 20 nt, synthetic construct
  misc_feature 1..20: note = spacer sequence
  source 1..20: mol_type = other RNA
agaccatagcctatctttcc

SEQ ID NO: 11977 - RNA, 20 nt, synthetic construct
  misc_feature 1..20: note = spacer sequence
  source 1..20: mol_type = other RNA
tctagaccatagcctatctt

SEQ ID NO: 11978 - RNA, 20 nt, synthetic construct
  misc_feature 1..20: note = spacer sequence
  source 1..20: mol_type = other RNA
aacgcacagcctgtaggctg

SEQ ID NO: 11979 - RNA, 20 nt, synthetic construct
  misc_feature 1..20: note = spacer sequence
  source 1..20: mol_type = other RNA
tgggccacatgcagcctaca

SEQ ID NO: 11980 - RNA, 20 nt, synthetic construct
  misc_feature 1..20: note = spacer sequence
  source 1..20: mol_type = other RNA
aagctgtcctgggccacatg

SEQ ID NO: 11981 - RNA, 20 nt, synthetic construct
  misc_feature 1..20: note = spacer sequence
  source 1..20: mol_type = other RNA
taaaacattatgagtttttt

SEQ ID NO: 11982 - RNA, 20 nt, synthetic construct
  misc_feature 1..20: note = spacer sequence
  source 1..20: mol_type = other RNA
taatgttttaagaaagtttg

SEQ ID NO: 11983 - RNA, 20 nt, synthetic construct
  misc_feature 1..20: note = spacer sequence
  source 1..20: mol_type = other RNA
tgttttagctcattagctat

SEQ ID NO: 11984 - RNA, 20 nt, synthetic construct
  misc_feature 1..20: note = spacer sequence
  source 1..20: mol_type = other RNA
ttagctatcattagtgttag

SEQ ID NO: 11985 - RNA, 20 nt, synthetic construct
  misc_feature 1..20: note = spacer sequence
  source 1..20: mol_type = other RNA
ttagtgttagcgtgttttat

SEQ ID NO: 11986 - RNA, 20 nt, synthetic construct
  misc_feature 1..20: note = spacer sequence
  source 1..20: mol_type = other RNA
tgggccacacataaaacacg

SEQ ID NO: 11987 - RNA, 20 nt, synthetic construct
  misc_feature 1..20: note = spacer sequence
  source 1..20: mol_type = other RNA
tcttcccatgtagcccaggg

SEQ ID NO: 11988 - RNA, 20 nt, synthetic construct
  misc_feature 1..20: note = spacer sequence
  source 1..20: mol_type = other RNA
tcccatgtagcccaggggaa

SEQ ID NO: 11989 - RNA, 20 nt, synthetic construct
  misc_feature 1..20: note = spacer sequence
  source 1..20: mol_type = other RNA
catgtagcccaggggaacca

SEQ ID NO: 11990 - RNA, 20 nt, synthetic construct
  misc_feature 1..20: note = spacer sequence
  source 1..20: mol_type = other RNA
cctgggctacatgggaagaa

SEQ ID NO: 11991 - RNA, 20 nt, synthetic construct
  misc_feature 1..20: note = spacer sequence
  source 1..20: mol_type = other RNA
tttggttcccctgggctaca

SEQ ID NO: 11992 - RNA, 20 nt, synthetic construct
  misc_feature 1..20: note = spacer sequence
  source 1..20: mol_type = other RNA
aatcttttggttcccctggg

SEQ ID NO: 11993 - RNA, 20 nt, synthetic construct
  misc_feature 1..20: note = spacer sequence
  source 1..20: mol_type = other RNA
agagcctcattattaagtgg

SEQ ID NO: 11994 - RNA, 20 nt, synthetic construct
  misc_feature 1..20: note = spacer sequence
  source 1..20: mol_type = other RNA
agaccaaggttgtccaatct

SEQ ID NO: 11995 - RNA, 20 nt, synthetic construct
  misc_feature 1..20: note = spacer sequence
  source 1..20: mol_type = other RNA
ttattaagtggtggagatga

SEQ ID NO: 11996 - RNA, 20 nt, synthetic construct
  misc_feature 1..20: note = spacer sequence
  source 1..20: mol_type = other RNA
accacttaataatgaggctc

SEQ ID NO: 11997 - RNA, 20 nt, synthetic construct
  misc_feature 1..20: note = spacer sequence
  source 1..20: mol_type = other RNA
ccaccacttaataatgaggc

SEQ ID NO: 11998 - RNA, 20 nt, synthetic construct
  misc_feature 1..20: note = spacer sequence
  source 1..20: mol_type = other RNA
tctccaccacttaataatga

SEQ ID NO: 11999 - RNA, 20 nt, synthetic construct
  misc_feature 1..20: note = spacer sequence
  source 1..20: mol_type = other RNA
catctccaccacttaataat

SEQ ID NO: 12000 - RNA, 20 nt, synthetic construct
  misc_feature 1..20: note = spacer sequence
  source 1..20: mol_type = other RNA
aacccaggcaacccaggacc

SEQ ID NO: 12001 - RNA, 20 nt, synthetic construct
  misc_feature 1..20: note = spacer sequence
  source 1..20: mol_type = other RNA
aatctcatctccaccactta

SEQ ID NO: 12002 - RNA, 20 nt, synthetic construct
  misc_feature 1..20: note = spacer sequence
  source 1..20: mol_type = other RNA
tgggttgcctgggttcgaat

SEQ ID NO: 12003 - RNA, 20 nt, synthetic construct
  misc_feature 1..20: note = spacer sequence
  source 1..20: mol_type = other RNA
ggctggtcctgggttgcctg

SEQ ID NO: 12004 - RNA, 20 nt, synthetic construct
  misc_feature 1..20: note = spacer sequence
  source 1..20: mol_type = other RNA
caatcgctatgtcatgctga

SEQ ID NO: 12005 - RNA, 20 nt, synthetic construct
  misc_feature 1..20: note = spacer sequence
  source 1..20: mol_type = other RNA
atcgctatgtcatgctgact

SEQ ID NO: 12006 - RNA, 20 nt, synthetic construct
  misc_feature 1..20: note = spacer sequence
  source 1..20: mol_type = other RNA
ctatgtcatgctgactggaa

SEQ ID NO: 12007 - RNA, 20 nt, synthetic construct
  misc_feature 1..20: note = spacer sequence
  source 1..20: mol_type = other RNA
tgctgactggaagcacagca

SEQ ID NO: 12008 - RNA, 20 nt, synthetic construct
  misc_feature 1..20: note = spacer sequence
  source 1..20: mol_type = other RNA
gcatgacatagcgattgaga

SEQ ID NO: 12009 - RNA, 20 nt, synthetic construct
  misc_feature 1..20: note = spacer sequence
  source 1..20: mol_type = other RNA
agtcagcatgacatagcgat

SEQ ID NO: 12010 - RNA, 20 nt, synthetic construct
  misc_feature 1..20: note = spacer sequence
  source 1..20: mol_type = other RNA
caaaaggtttgttattggct

SEQ ID NO: 12011 - RNA, 20 nt, synthetic construct
  misc_feature 1..20: note = spacer sequence
  source 1..20: mol_type = other RNA
aaaggtttgttattggctga

SEQ ID NO: 12012 - RNA, 20 nt, synthetic construct
  misc_feature 1..20: note = spacer sequence
  source 1..20: mol_type = other RNA
gccaataacaaaccttttga

SEQ ID NO: 12013 - RNA, 20 nt, synthetic construct
  misc_feature 1..20: note = spacer sequence
  source 1..20: mol_type = other RNA
cagccaataacaaacctttt

SEQ ID NO: 12014 - RNA, 20 nt, synthetic construct
  misc_feature 1..20: note = spacer sequence
  source 1..20: mol_type = other RNA
tgacttcccctagaatccca

SEQ ID NO: 12015 - RNA, 20 nt, synthetic construct
  misc_feature 1..20: note = spacer sequence
  source 1..20: mol_type = other RNA
agacctctcagccaataaca

SEQ ID NO: 12016 - RNA, 20 nt, synthetic construct
  misc_feature 1..20: note = spacer sequence
  source 1..20: mol_type = other RNA
cctagaatcccagggttgct

SEQ ID NO: 12017 - RNA, 20 nt, synthetic construct
  misc_feature 1..20: note = spacer sequence
  source 1..20: mol_type = other RNA
aggggaagtcaagacctctc

SEQ ID NO: 12018 - RNA, 20 nt, synthetic construct
  misc_feature 1..20: note = spacer sequence
  source 1..20: mol_type = other RNA
cagggttgctgactttgttt

SEQ ID NO: 12019 - RNA, 20 nt, synthetic construct
  misc_feature 1..20: note = spacer sequence
  source 1..20: mol_type = other RNA
gcaaccctgggattctaggg

SEQ ID NO: 12020 - RNA, 20 nt, synthetic construct
  misc_feature 1..20: note = spacer sequence
  source 1..20: mol_type = other RNA
cccgtcagagcctgccacag

SEQ ID NO: 12021 - RNA, 20 nt, synthetic construct
  misc_feature 1..20: note = spacer sequence
  source 1..20: mol_type = other RNA
cgtcagagcctgccacagac

SEQ ID NO: 12022 - RNA, 20 nt, synthetic construct
  misc_feature 1..20: note = spacer sequence
  source 1..20: mol_type = other RNA
gagcctgccacagactcctt

SEQ ID NO: 12023 - RNA, 20 nt, synthetic construct
  misc_feature 1..20: note = spacer sequence
  source 1..20: mol_type = other RNA
gacgggagaaacaaagtcag

SEQ ID NO: 12024 - RNA, 20 nt, synthetic construct
  misc_feature 1..20: note = spacer sequence
  source 1..20: mol_type = other RNA
gtggcaggctctgacgggag

SEQ ID NO: 12025 - RNA, 20 nt, synthetic construct
  misc_feature 1..20: note = spacer sequence
  source 1..20: mol_type = other RNA
ttattggatccgagttggcc

SEQ ID NO: 12026 - RNA, 20 nt, synthetic construct
  misc_feature 1..20: note = spacer sequence
  source 1..20: mol_type = other RNA
aataaggagtctgtggcagg

SEQ ID NO: 12027 - RNA, 20 nt, synthetic construct
  misc_feature 1..20: note = spacer sequence
  source 1..20: mol_type = other RNA
gagttggccagagacccttc

SEQ ID NO: 12028 - RNA, 20 nt, synthetic construct
  misc_feature 1..20: note = spacer sequence
  source 1..20: mol_type = other RNA
gatccaataaggagtctgtg

SEQ ID NO: 12029 - RNA, 20 nt, synthetic construct
  misc_feature 1..20: note = spacer sequence
  source 1..20: mol_type = other RNA
ggccaactcggatccaataa

SEQ ID NO: 12030 - RNA, 20 nt, synthetic construct
  misc_feature 1..20: note = spacer sequence
  source 1..20: mol_type = other RNA
ctggccaactcggatccaat

SEQ ID NO: 12031 - RNA, 20 nt, synthetic construct
  misc_feature 1..20: note = spacer sequence
  source 1..20: mol_type = other RNA
gacctcattgaatcagctgg

SEQ ID NO: 12032 - RNA, 20 nt, synthetic construct
  misc_feature 1..20: note = spacer sequence
  source 1..20: mol_type = other RNA
gaagggtctctggccaactc

SEQ ID NO: 12033 - RNA, 20 nt, synthetic construct
  misc_feature 1..20: note = spacer sequence
  source 1..20: mol_type = other RNA
ttgaatcagctgggtcacaa

SEQ ID NO: 12034 - RNA, 20 nt, synthetic construct
  misc_feature 1..20: note = spacer sequence
  source 1..20: mol_type = other RNA
atgaggtctgaagggtctct

SEQ ID NO: 12035 - RNA, 20 nt, synthetic construct
  misc_feature 1..20: note = spacer sequence
  source 1..20: mol_type = other RNA
gctgggtcacaagtgccaag

SEQ ID NO: 12036 - RNA, 20 nt, synthetic construct
  misc_feature 1..20: note = spacer sequence
  source 1..20: mol_type = other RNA
caagtgccaagttgctcgca

SEQ ID NO: 12037 - RNA, 20 nt, synthetic construct
  misc_feature 1..20: note = spacer sequence
  source 1..20: mol_type = other RNA
cagtgcagcctggaccggct

SEQ ID NO: 12038 - RNA, 20 nt, synthetic construct
  misc_feature 1..20: note = spacer sequence
  source 1..20: mol_type = other RNA
aggctgcactgcgagcaact

SEQ ID NO: 12039 - RNA, 20 nt, synthetic construct
  misc_feature 1..20: note = spacer sequence
  source 1..20: mol_type = other RNA
ggaacttctcattgtcaaag

SEQ ID NO: 12040 - RNA, 20 nt, synthetic construct
  misc_feature 1..20: note = spacer sequence
  source 1..20: mol_type = other RNA
agagccggtccaggctgcac

SEQ ID NO: 12041 - RNA, 20 nt, synthetic construct
  misc_feature 1..20: note = spacer sequence
  source 1..20: mol_type = other RNA
cattgtcaaagctaagagtc

SEQ ID NO: 12042 - RNA, 20 nt, synthetic construct
  misc_feature 1..20: note = spacer sequence
  source 1..20: mol_type = other RNA
ttgtcaaagctaagagtcaa

SEQ ID NO: 12043 - RNA, 20 nt, synthetic construct
  misc_feature 1..20: note = spacer sequence
  source 1..20: mol_type = other RNA
aagctaagagtcaattgagt

SEQ ID NO: 12044 - RNA, 20 nt, synthetic construct
  misc_feature 1..20: note = spacer sequence
  source 1..20: mol_type = other RNA
tagctttgacaatgagaagt

SEQ ID NO: 12045 - RNA, 20 nt, synthetic construct
  misc_feature 1..20: note = spacer sequence
  source 1..20: mol_type = other RNA
attgagtcacccactgagtc

SEQ ID NO: 12046 - RNA, 20 nt, synthetic construct
  misc_feature 1..20: note = spacer sequence
  source 1..20: mol_type = other RNA
attgactcttagctttgaca

SEQ ID NO: 12047 - RNA, 20 nt, synthetic construct
  misc_feature 1..20: note = spacer sequence
  source 1..20: mol_type = other RNA
cccactgagtcagatggcat

SEQ ID NO: 12048 - RNA, 20 nt, synthetic construct
  misc_feature 1..20: note = spacer sequence
  source 1..20: mol_type = other RNA
gtgggtgactcaattgactc

SEQ ID NO: 12049 - RNA, 20 nt, synthetic construct
  misc_feature 1..20: note = spacer sequence
  source 1..20: mol_type = other RNA
gatggcatactcaaatgtat

SEQ ID NO: 12050 - RNA, 20 nt, synthetic construct
  misc_feature 1..20: note = spacer sequence
  source 1..20: mol_type = other RNA
gactcagtgggtgactcaat

SEQ ID NO: 12051 - RNA, 20 nt, synthetic construct
  misc_feature 1..20: note = spacer sequence
  source 1..20: mol_type = other RNA
aatgtattgcacaagtctaa

SEQ ID NO: 12052 - RNA, 20 nt, synthetic construct
  misc_feature 1..20: note = spacer sequence
  source 1..20: mol_type = other RNA
aaaatcctgtgtaggcccac

SEQ ID NO: 12053 - RNA, 20 nt, synthetic construct
  misc_feature 1..20: note = spacer sequence
  source 1..20: mol_type = other RNA
tgtgtaggcccacaaacatt

SEQ ID NO: 12054 - RNA, 20 nt, synthetic construct
  misc_feature 1..20: note = spacer sequence
  source 1..20: mol_type = other RNA
ggtgcaatgtttgtgggcct

SEQ ID NO: 12055 - RNA, 20 nt, synthetic construct
  misc_feature 1..20: note = spacer sequence
  source 1..20: mol_type = other RNA
tagtgatagggcataccagg

SEQ ID NO: 12056 - RNA, 20 nt, synthetic construct
  misc_feature 1..20: note = spacer sequence
  source 1..20: mol_type = other RNA
ctaggactcaggtgcaatgt

SEQ ID NO: 12057 - RNA, 20 nt, synthetic construct
  misc_feature 1..20: note = spacer sequence
  source 1..20: mol_type = other RNA
ttttggagaaagagccctag

SEQ ID NO: 12058 - RNA, 20 nt, synthetic construct
  misc_feature 1..20: note = spacer sequence
  source 1..20: mol_type = other RNA
aaaatgaaaagcaagttgct

SEQ ID NO: 12059 - RNA, 20 nt, synthetic construct
  misc_feature 1..20: note = spacer sequence
  source 1..20: mol_type = other RNA
ccaaaatgaaaagcaagttg

SEQ ID NO: 12060 - RNA, 20 nt, synthetic construct
  misc_feature 1..20: note = spacer sequence
  source 1..20: mol_type = other RNA
ttctccaaaatgaaaagcaa

SEQ ID NO: 12061 - RNA, 20 nt, synthetic construct
  misc_feature 1..20: note = spacer sequence
  source 1..20: mol_type = other RNA
cccagatcattgaacacctt

SEQ ID NO: 12062 - RNA, 20 nt, synthetic construct
  misc_feature 1..20: note = spacer sequence
  source 1..20: mol_type = other RNA
gggggactagggctctttct

SEQ ID NO: 12063 - RNA, 20 nt, synthetic construct
  misc_feature 1..20: note = spacer sequence
  source 1..20: mol_type = other RNA
ttgaacaccttcccccacct

SEQ ID NO: 12064 - RNA, 20 nt, synthetic construct
  misc_feature 1..20: note = spacer sequence
  source 1..20: mol_type = other RNA
atgatctgggggactagggc

SEQ ID NO: 12065 - RNA, 20 nt, synthetic construct
  misc_feature 1..20: note = spacer sequence
  source 1..20: mol_type = other RNA
cccacctctgctccaaatcc

SEQ ID NO: 12066 - RNA, 20 nt, synthetic construct
  misc_feature 1..20: note = spacer sequence
  source 1..20: mol_type = other RNA
gctccaaatccactgtccca

SEQ ID NO: 12067 - RNA, 20 nt, synthetic construct
  misc_feature 1..20: note = spacer sequence
  source 1..20: mol_type = other RNA
aaatccactgtcccaaatct

SEQ ID NO: 12068 - RNA, 20 nt, synthetic construct
  misc_feature 1..20: note = spacer sequence
  source 1..20: mol_type = other RNA
actgtcccaaatcttctgta

SEQ ID NO: 12069 - RNA, 20 nt, synthetic construct
  misc_feature 1..20: note = spacer sequence
  source 1..20: mol_type = other RNA
caaatcttctgtagctttgg

SEQ ID NO: 12070 - RNA, 20 nt, synthetic construct
  misc_feature 1..20: note = spacer sequence
  source 1..20: mol_type = other RNA
tctgtagctttgggagattt

SEQ ID NO: 12071 - RNA, 20 nt, synthetic construct
  misc_feature 1..20: note = spacer sequence
  source 1..20: mol_type = other RNA
gtagctttgggagatttctc

SEQ ID NO: 12072 - RNA, 20 nt, synthetic construct
  misc_feature 1..20: note = spacer sequence
  source 1..20: mol_type = other RNA
caaagctacagaagatttgg

SEQ ID NO: 12073 - RNA, 20 nt, synthetic construct
  misc_feature 1..20: note = spacer sequence
  source 1..20: mol_type = other RNA
cccaaagctacagaagattt

SEQ ID NO: 12074 - RNA, 20 nt, synthetic construct
  misc_feature 1..20: note = spacer sequence
  source 1..20: mol_type = other RNA
cttctacccattgttgtgaa

SEQ ID NO: 12075 - RNA, 20 nt, synthetic construct
  misc_feature 1..20: note = spacer sequence
  source 1..20: mol_type = other RNA
tctacccattgttgtgaatt

SEQ ID NO: 12076 - RNA, 20 nt, synthetic construct
  misc_feature 1..20: note = spacer sequence
  source 1..20: mol_type = other RNA
acccattgttgtgaattttt

SEQ ID NO: 12077 - RNA, 20 nt, synthetic construct
  misc_feature 1..20: note = spacer sequence
  source 1..20: mol_type = other RNA
caacaatgggtagaagagaa

SEQ ID NO: 12078 - RNA, 20 nt, synthetic construct
  misc_feature 1..20: note = spacer sequence
  source 1..20: mol_type = other RNA
taaacttaatcagttacatg

SEQ ID NO: 12079 - RNA, 20 nt, synthetic construct
  misc_feature 1..20: note = spacer sequence
  source 1..20: mol_type = other RNA
ttccccaagccccatctggt

SEQ ID NO: 12080 - RNA, 20 nt, synthetic construct
  misc_feature 1..20: note = spacer sequence
  source 1..20: mol_type = other RNA
ccaagccccatctggttttc

SEQ ID NO: 12081 - RNA, 20 nt, synthetic construct
  misc_feature 1..20: note = spacer sequence
  source 1..20: mol_type = other RNA
ggttttcttcactagtcaaa

SEQ ID NO: 12082 - RNA, 20 nt, synthetic construct
  misc_feature 1..20: note = spacer sequence
  source 1..20: mol_type = other RNA
tcactagtcaaactagagag

SEQ ID NO: 12083 - RNA, 20 nt, synthetic construct
  misc_feature 1..20: note = spacer sequence
  source 1..20: mol_type = other RNA
ctagtcaaactagagagtta

SEQ ID NO: 12084 - RNA, 20 nt, synthetic construct
  misc_feature 1..20: note = spacer sequence
  source 1..20: mol_type = other RNA
aactagagagttaaaaggga

SEQ ID NO: 12085 - RNA, 20 nt, synthetic construct
  misc_feature 1..20: note = spacer sequence
  source 1..20: mol_type = other RNA
agtttgactagtgaagaaaa

SEQ ID NO: 12086 - RNA, 20 nt, synthetic construct
  misc_feature 1..20: note = spacer sequence
  source 1..20: mol_type = other RNA
ctagtttgactagtgaagaa

SEQ ID NO: 12087 - RNA, 20 nt, synthetic construct
  misc_feature 1..20: note = spacer sequence
  source 1..20: mol_type = other RNA
cttttaactctctagtttga

SEQ ID NO: 12088 - RNA, 20 nt, synthetic construct
  misc_feature 1..20: note = spacer sequence
  source 1..20: mol_type = other RNA
cattcccttttaactctcta

SEQ ID NO: 12089 - RNA, 20 nt, synthetic construct
  misc_feature 1..20: note = spacer sequence
  source 1..20: mol_type = other RNA
tcacctctggatctttcatg

SEQ ID NO: 12090 - RNA, 20 nt, synthetic construct
  misc_feature 1..20: note = spacer sequence
  source 1..20: mol_type = other RNA
cctctggatctttcatgtct

SEQ ID NO: 12091 - RNA, 20 nt, synthetic construct
  misc_feature 1..20: note = spacer sequence
  source 1..20: mol_type = other RNA
ggatctttcatgtctattaa

SEQ ID NO: 12092 - RNA, 20 nt, synthetic construct
  misc_feature 1..20: note = spacer sequence
  source 1..20: mol_type = other RNA
agaggtgatgattgctatca

SEQ ID NO: 12093 - RNA, 20 nt, synthetic construct
  misc_feature 1..20: note = spacer sequence
  source 1..20: mol_type = other RNA
tacctaactcaccataaatc

SEQ ID NO: 12094 - RNA, 20 nt, synthetic construct
  misc_feature 1..20: note = spacer sequence
  source 1..20: mol_type = other RNA
ccataaatcccttctctgac

SEQ ID NO: 12095 - RNA, 20 nt, synthetic construct
  misc_feature 1..20: note = spacer sequence
  source 1..20: mol_type = other RNA
cttctctgactggtgggcaa

SEQ ID NO: 12096 - RNA, 20 nt, synthetic construct
  misc_feature 1..20: note = spacer sequence
  source 1..20: mol_type = other RNA
ctgactggtgggcaacagtg

SEQ ID NO: 12097 - RNA, 20 nt, synthetic construct
  misc_feature 1..20: note = spacer sequence
  source 1..20: mol_type = other RNA
gactggtgggcaacagtggt

SEQ ID NO: 12098 - RNA, 20 nt, synthetic construct
  misc_feature 1..20: note = spacer sequence
  source 1..20: mol_type = other RNA
gagaagggatttatggtgag

SEQ ID NO: 12099 - RNA, 20 nt, synthetic construct
  misc_feature 1..20: note = spacer sequence
  source 1..20: mol_type = other RNA
aggtccataggaattagcat

SEQ ID NO: 12100 - RNA, 20 nt, synthetic construct
  misc_feature 1..20: note = spacer sequence
  source 1..20: mol_type = other RNA
ataggaattagcattagtaa

SEQ ID NO: 12101 - RNA, 20 nt, synthetic construct
  misc_feature 1..20: note = spacer sequence
  source 1..20: mol_type = other RNA
tatggacctggaataccact

SEQ ID NO: 12102 - RNA, 20 nt, synthetic construct
  misc_feature 1..20: note = spacer sequence
  source 1..20: mol_type = other RNA
taatgttttaagaaagttta

SEQ ID NO: 12103 - RNA, 20 nt, synthetic construct
  misc_feature 1..20: note = spacer sequence
  source 1..20: mol_type = other RNA
taaaacattatgatatatat

SEQ ID NO: 12104 - RNA, 20 nt, synthetic construct
  misc_feature 1..20: note = spacer sequence
  source 1..20: mol_type = other RNA
taaactttcttaaaacatta

SEQ ID NO: 12105 - RNA, 20 nt, synthetic construct
  misc_feature 1..20: note = spacer sequence
  source 1..20: mol_type = other RNA
aggccaacctgggccacatg

SEQ ID NO: 12106 - RNA, 20 nt, synthetic construct
  misc_feature 1..20: note = spacer sequence
  source 1..20: mol_type = other RNA
caggttgcaaaggcttaatt

SEQ ID NO: 12107 - RNA, 20 nt, synthetic construct
  misc_feature 1..20: note = spacer sequence
  source 1..20: mol_type = other RNA
ggttgcaaaggcttaattta

SEQ ID NO: 12108 - RNA, 20 nt, synthetic construct
  misc_feature 1..20: note = spacer sequence
  source 1..20: mol_type = other RNA
aaattaagcctttgcaacct

SEQ ID NO: 12109 - RNA, 20 nt, synthetic construct
  misc_feature 1..20: note = spacer sequence
  source 1..20: mol_type = other RNA
gtgatcttattgtaacattc

SEQ ID NO: 12110 - RNA, 20 nt, synthetic construct
  misc_feature 1..20: note = spacer sequence
  source 1..20: mol_type = other RNA
cagatacatactctaaatta

SEQ ID NO: 12111 - RNA, 20 nt, synthetic construct
  misc_feature 1..20: note = spacer sequence
  source 1..20: mol_type = other RNA
tattgtaacattcttcatca

SEQ ID NO: 12112 - RNA, 20 nt, synthetic construct
  misc_feature 1..20: note = spacer sequence
  source 1..20: mol_type = other RNA
tcatcaagaatacctggtct

SEQ ID NO: 12113 - RNA, 20 nt, synthetic construct
  misc_feature 1..20: note = spacer sequence
  source 1..20: mol_type = other RNA
tcaagaatacctggtctgtt

SEQ ID NO: 12114 - RNA, 20 nt, synthetic construct
  misc_feature 1..20: note = spacer sequence
  source 1..20: mol_type = other RNA
agaatacctggtctgttttc

SEQ ID NO: 12115 - RNA, 20 nt, synthetic construct
  misc_feature 1..20: note = spacer sequence
  source 1..20: mol_type = other RNA
tgatgaagaatgttacaata

SEQ ID NO: 12116 - RNA, 20 nt, synthetic construct
  misc_feature 1..20: note = spacer sequence
  source 1..20: mol_type = other RNA
gttttcattcaagagcctct

SEQ ID NO: 12117 - RNA, 20 nt, synthetic construct
  misc_feature 1..20: note = spacer sequence
  source 1..20: mol_type = other RNA
ttcaagagcctctgggtctg

SEQ ID NO: 12118 - RNA, 20 nt, synthetic construct
  misc_feature 1..20: note = spacer sequence
  source 1..20: mol_type = other RNA
agagcctctgggtctgtgat

SEQ ID NO: 12119 - RNA, 20 nt, synthetic construct
  misc_feature 1..20: note = spacer sequence
  source 1..20: mol_type = other RNA
tgaatgaaaacagaccaggt

SEQ ID NO: 12120 - RNA, 20 nt, synthetic construct
  misc_feature 1..20: note = spacer sequence
  source 1..20: mol_type = other RNA
gggtctgtgatacaattcag

SEQ ID NO: 12121 - RNA, 20 nt, synthetic construct
  misc_feature 1..20: note = spacer sequence
  source 1..20: mol_type = other RNA
gtgatacaattcaggtcttg

SEQ ID NO: 12122 - RNA, 20 nt, synthetic construct
  misc_feature 1..20: note = spacer sequence
  source 1..20: mol_type = other RNA
cagacccagaggctcttgaa

SEQ ID NO: 12123 - RNA, 20 nt, synthetic construct
  misc_feature 1..20: note = spacer sequence
  source 1..20: mol_type = other RNA
ggtcttgaattgagaatgtc

SEQ ID NO: 12124 - RNA, 20 nt, synthetic construct
  misc_feature 1..20: note = spacer sequence
  source 1..20: mol_type = other RNA
tgaattgagaatgtctatcc

SEQ ID NO: 12125 - RNA, 20 nt, synthetic construct
  misc_feature 1..20: note = spacer sequence
  source 1..20: mol_type = other RNA
agacctgaattgtatcacag

SEQ ID NO: 12126 - RNA, 20 nt, synthetic construct
  misc_feature 1..20: note = spacer sequence
  source 1..20: mol_type = other RNA
attcaagacctgaattgtat

SEQ ID NO: 12127 - RNA, 20 nt, synthetic construct
  misc_feature 1..20: note = spacer sequence
  source 1..20: mol_type = other RNA
caattcaagacctgaattgt

SEQ ID NO: 12128 - RNA, 20 nt, synthetic construct
  misc_feature 1..20: note = spacer sequence
  source 1..20: mol_type = other RNA
atcccagaggctcgatccat

SEQ ID NO: 12129 - RNA, 20 nt, synthetic construct
  misc_feature 1..20: note = spacer sequence
  source 1..20: mol_type = other RNA
cagaggctcgatccatgcct

SEQ ID NO: 12130 - RNA, 20 nt, synthetic construct
  misc_feature 1..20: note = spacer sequence
  source 1..20: mol_type = other RNA
gggatagacattctcaattc

SEQ ID NO: 12131 - RNA, 20 nt, synthetic construct
  misc_feature 1..20: note = spacer sequence
  source 1..20: mol_type = other RNA
atccatgcctcttgttaatc

SEQ ID NO: 12132 - RNA, 20 nt, synthetic construct
  misc_feature 1..20: note = spacer sequence
  source 1..20: mol_type = other RNA
agcctctgggatagacattc

SEQ ID NO: 12133 - RNA, 20 nt, synthetic construct
  misc_feature 1..20: note = spacer sequence
  source 1..20: mol_type = other RNA
atgcctcttgttaatcaggt

SEQ ID NO: 12134 - RNA, 20 nt, synthetic construct
  misc_feature 1..20: note = spacer sequence
  source 1..20: mol_type = other RNA
tgttaatcaggtctgagtgg

SEQ ID NO: 12135 - RNA, 20 nt, synthetic construct
  misc_feature 1..20: note = spacer sequence
  source 1..20: mol_type = other RNA
ggtctgagtgggctccttaa

SEQ ID NO: 12136 - RNA, 20 nt, synthetic construct
  misc_feature 1..20: note = spacer sequence
  source 1..20: mol_type = other RNA
gagtgggctccttaatgctc

SEQ ID NO: 12137 - RNA, 20 nt, synthetic construct
  misc_feature 1..20: note = spacer sequence
  source 1..20: mol_type = other RNA
gacctgattaacaagaggca

SEQ ID NO: 12138 - RNA, 20 nt, synthetic construct
  misc_feature 1..20: note = spacer sequence
  source 1..20: mol_type = other RNA
ttaatgctcttggtcctaga

SEQ ID NO: 12139 - RNA, 20 nt, synthetic construct
  misc_feature 1..20: note = spacer sequence
  source 1..20: mol_type = other RNA
tggtcctagaaattccttgg

SEQ ID NO: 12140 - RNA, 20 nt, synthetic construct
  misc_feature 1..20: note = spacer sequence
  source 1..20: mol_type = other RNA
tagaaattccttggtcaatt

SEQ ID NO: 12141 - RNA, 20 nt, synthetic construct
  misc_feature 1..20: note = spacer sequence
  source 1..20: mol_type = other RNA
aggaccaagagcattaagga

SEQ ID NO: 12142 - RNA, 20 nt, synthetic construct
  misc_feature 1..20: note = spacer sequence
  source 1..20: mol_type = other RNA
ttggtcaattagcatggtga

SEQ ID NO: 12143 - RNA, 20 nt, synthetic construct
  misc_feature 1..20: note = spacer sequence
  source 1..20: mol_type = other RNA
attagcatggtgaaagaccc

SEQ ID NO: 12144 - RNA, 20 nt, synthetic construct
  misc_feature 1..20: note = spacer sequence
  source 1..20: mol_type = other RNA
ccatgctaattgaccaagga

SEQ ID NO: 12145 - RNA, 20 nt, synthetic construct
  misc_feature 1..20: note = spacer sequence
  source 1..20: mol_type = other RNA
ttcaccatgctaattgacca

SEQ ID NO: 12146 - RNA, 20 nt, synthetic construct
  misc_feature 1..20: note = spacer sequence
  source 1..20: mol_type = other RNA
gcctagcaggggtctttcac

SEQ ID NO: 12147 - RNA, 20 nt, synthetic construct
  misc_feature 1..20: note = spacer sequence
  source 1..20: mol_type = other RNA
aactgctctgcctagcaggg

SEQ ID NO: 12148 - RNA, 20 nt, synthetic construct
  misc_feature 1..20: note = spacer sequence
  source 1..20: mol_type = other RNA
attctggccctacttccttg

SEQ ID NO: 12149 - RNA, 20 nt, synthetic construct
  misc_feature 1..20: note = spacer sequence
  source 1..20: mol_type = other RNA
ggccctacttccttgtgcac

SEQ ID NO: 12150 - RNA, 20 nt, synthetic construct
  misc_feature 1..20: note = spacer sequence
  source 1..20: mol_type = other RNA
ttgtgcactagggggtggtt

SEQ ID NO: 12151 - RNA, 20 nt, synthetic construct
  misc_feature 1..20: note = spacer sequence
  source 1..20: mol_type = other RNA
ccaaaccaccccctagtgca

SEQ ID NO: 12152 - RNA, 20 nt, synthetic construct
  misc_feature 1..20: note = spacer sequence
  source 1..20: mol_type = other RNA
ccagcctatccccaaaccac

SEQ ID NO: 12153 - RNA, 20 nt, synthetic construct
  misc_feature 1..20: note = spacer sequence
  source 1..20: mol_type = other RNA
gtatttatttccccagccta

SEQ ID NO: 12154 - RNA, 20 nt, synthetic construct
  misc_feature 1..20: note = spacer sequence
  source 1..20: mol_type = other RNA
ggaggtggtttggggatggt

SEQ ID NO: 12155 - RNA, 20 nt, synthetic construct
  misc_feature 1..20: note = spacer sequence
  source 1..20: mol_type = other RNA
agatagcaaatacaaatcag

SEQ ID NO: 12156 - RNA, 20 nt, synthetic construct
  misc_feature 1..20: note = spacer sequence
  source 1..20: mol_type = other RNA
ccaaaccacctccagatagc

SEQ ID NO: 12157 - RNA, 20 nt, synthetic construct
  misc_feature 1..20: note = spacer sequence
  source 1..20: mol_type = other RNA
agttagccaagtgtaggtca

SEQ ID NO: 12158 - RNA, 20 nt, synthetic construct
  misc_feature 1..20: note = spacer sequence
  source 1..20: mol_type = other RNA
cttatccatagccttgcaac

SEQ ID NO: 12159 - RNA, 20 nt, synthetic construct
  misc_feature 1..20: note = spacer sequence
  source 1..20: mol_type = other RNA
atagccttgcaacagaagag

SEQ ID NO: 12160 - RNA, 20 nt, synthetic construct
  misc_feature 1..20: note = spacer sequence
  source 1..20: mol_type = other RNA
gttgcaaggctatggataag

SEQ ID NO: 12161 - RNA, 20 nt, synthetic construct
  misc_feature 1..20: note = spacer sequence
  source 1..20: mol_type = other RNA
tctgttgcaaggctatggat

SEQ ID NO: 12162 - RNA, 20 nt, synthetic construct
  misc_feature 1..20: note = spacer sequence
  source 1..20: mol_type = other RNA
ccaggctcttctgttgcaag

SEQ ID NO: 12163 - RNA, 20 nt, synthetic construct
  misc_feature 1..20: note = spacer sequence
  source 1..20: mol_type = other RNA
caactccccaggctcttctg

SEQ ID NO: 12164 - RNA, 20 nt, synthetic construct
  misc_feature 1..20: note = spacer sequence
  source 1..20: mol_type = other RNA
ctgtttcacaactccccagg

SEQ ID NO: 12165 - RNA, 20 nt, synthetic construct
  misc_feature 1..20: note = spacer sequence
  source 1..20: mol_type = other RNA
gtttcaactgccggaaatag

SEQ ID NO: 12166 - RNA, 20 nt, synthetic construct
  misc_feature 1..20: note = spacer sequence
  source 1..20: mol_type = other RNA
actgccggaaatagtctgcc

SEQ ID NO: 12167 - RNA, 20 nt, synthetic construct
  misc_feature 1..20: note = spacer sequence
  source 1..20: mol_type = other RNA
ggcagttgaaactgaaaatc

SEQ ID NO: 12168 - RNA, 20 nt, synthetic construct
  misc_feature 1..20: note = spacer sequence
  source 1..20: mol_type = other RNA
gcctttcagcagaatttata

SEQ ID NO: 12169 - RNA, 20 nt, synthetic construct
  misc_feature 1..20: note = spacer sequence
  source 1..20: mol_type = other RNA
gcagaatttataatctgggg

SEQ ID NO: 12170 - RNA, 20 nt, synthetic construct
  misc_feature 1..20: note = spacer sequence
  source 1..20: mol_type = other RNA
gctgaaaggcagactatttc

SEQ ID NO: 12171 - RNA, 20 nt, synthetic construct
  misc_feature 1..20: note = spacer sequence
  source 1..20: mol_type = other RNA
ggggaaataaattcagattt

SEQ ID NO: 12172 - RNA, 20 nt, synthetic construct
  misc_feature 1..20: note = spacer sequence
  source 1..20: mol_type = other RNA
ccagattataaattctgctg

SEQ ID NO: 12173 - RNA, 20 nt, synthetic construct
  misc_feature 1..20: note = spacer sequence
  source 1..20: mol_type = other RNA
gattttcattgtaaacatag

SEQ ID NO: 12174 - RNA, 20 nt, synthetic construct
  misc_feature 1..20: note = spacer sequence
  source 1..20: mol_type = other RNA
gaatttatttccccagatta

SEQ ID NO: 12175 - RNA, 20 nt, synthetic construct
  misc_feature 1..20: note = spacer sequence
  source 1..20: mol_type = other RNA
ttgtaaacataggaagaagg

SEQ ID NO: 12176 - RNA, 20 nt, synthetic construct
  misc_feature 1..20: note = spacer sequence
  source 1..20: mol_type = other RNA
tatgtttacaatgaaaatct

SEQ ID NO: 12177 - RNA, 20 nt, synthetic construct
  misc_feature 1..20: note = spacer sequence
  source 1..20: mol_type = other RNA
tcctatgtttacaatgaaaa

SEQ ID NO: 12178 - RNA, 20 nt, synthetic construct
  misc_feature 1..20: note = spacer sequence
  source 1..20: mol_type = other RNA
gaggttgctcagccaaaaat

SEQ ID NO: 12179 - RNA, 20 nt, synthetic construct
  misc_feature 1..20: note = spacer sequence
  source 1..20: mol_type = other RNA
gaaccttcttcctatgttta

SEQ ID NO: 12180 - RNA, 20 nt, synthetic construct
  misc_feature 1..20: note = spacer sequence
  source 1..20: mol_type = other RNA
gccaaaaatgatgacaaatg

SEQ ID NO: 12181 - RNA, 20 nt, synthetic construct
  misc_feature 1..20: note = spacer sequence
  source 1..20: mol_type = other RNA
tttttggctgagcaacctct

SEQ ID NO: 12182 - RNA, 20 nt, synthetic construct
  misc_feature 1..20: note = spacer sequence
  source 1..20: mol_type = other RNA
tcatttttggctgagcaacc

SEQ ID NO: 12183 - RNA, 20 nt, synthetic construct
  misc_feature 1..20: note = spacer sequence
  source 1..20: mol_type = other RNA
acaattcatctcaccttctt

SEQ ID NO: 12184 - RNA, 20 nt, synthetic construct
  misc_feature 1..20: note = spacer sequence
  source 1..20: mol_type = other RNA
tctcaccttcttctgtcatt

SEQ ID NO: 12185 - RNA, 20 nt, synthetic construct
  misc_feature 1..20: note = spacer sequence
  source 1..20: mol_type = other RNA
caccttcttctgtcatttaa

SEQ ID NO: 12186 - RNA, 20 nt, synthetic construct
  misc_feature 1..20: note = spacer sequence
  source 1..20: mol_type = other RNA
ccttcttctgtcatttaaca

SEQ ID NO: 12187 - RNA, 20 nt, synthetic construct
  misc_feature 1..20: note = spacer sequence
  source 1..20: mol_type = other RNA
tctgtcatttaacaactgta

SEQ ID NO: 12188 - RNA, 20 nt, synthetic construct
  misc_feature 1..20: note = spacer sequence
  source 1..20: mol_type = other RNA
gtcatttaacaactgtaagg

SEQ ID NO: 12189 - RNA, 20 nt, synthetic construct
  misc_feature 1..20: note = spacer sequence
  source 1..20: mol_type = other RNA
tttaacaactgtaaggttta

SEQ ID NO: 12190 - RNA, 20 nt, synthetic construct
  misc_feature 1..20: note = spacer sequence
  source 1..20: mol_type = other RNA
aaaccttacagttgttaaat

SEQ ID NO: 12191 - RNA, 20 nt, synthetic construct
  misc_feature 1..20: note = spacer sequence
  source 1..20: mol_type = other RNA
tctaaaccttacagttgtta

SEQ ID NO: 12192 - RNA, 20 nt, synthetic construct
  misc_feature 1..20: note = spacer sequence
  source 1..20: mol_type = other RNA
cagcttcaaacgtagttcat

SEQ ID NO: 12193 - RNA, 20 nt, synthetic construct
  misc_feature 1..20: note = spacer sequence
  source 1..20: mol_type = other RNA
gcttcaaacgtagttcatgt

SEQ ID NO: 12194 - RNA, 20 nt, synthetic construct
  misc_feature 1..20: note = spacer sequence
  source 1..20: mol_type = other RNA
aacgtagttcatgttttatt

SEQ ID NO: 12195 - RNA, 20 nt, synthetic construct
  misc_feature 1..20: note = spacer sequence
  source 1..20: mol_type = other RNA
tgttttattcaaaccaagtt

SEQ ID NO: 12196 - RNA, 20 nt, synthetic construct
  misc_feature 1..20: note = spacer sequence
  source 1..20: mol_type = other RNA
aaccaagttgaataatgcaa

SEQ ID NO: 12197 - RNA, 20 nt, synthetic construct
  misc_feature 1..20: note = spacer sequence
  source 1..20: mol_type = other RNA
acttggtttgaataaaacat

SEQ ID NO: 12198 - RNA, 20 nt, synthetic construct
  misc_feature 1..20: note = spacer sequence
  source 1..20: mol_type = other RNA
ctttgccagtgacttattca

SEQ ID NO: 12199 - RNA, 20 nt, synthetic construct
  misc_feature 1..20: note = spacer sequence
  source 1..20: mol_type = other RNA
ttgccagtgacttattcaga

SEQ ID NO: 12200 - RNA, 20 nt, synthetic construct
  misc_feature 1..20: note = spacer sequence
  source 1..20: mol_type = other RNA
ctggcaaagagaattgcatt

SEQ ID NO: 12201 - RNA, 20 nt, synthetic construct
  misc_feature 1..20: note = spacer sequence
  source 1..20: mol_type = other RNA
gaaaatcagacctaagctag

SEQ ID NO: 12202 - RNA, 20 nt, synthetic construct
  misc_feature 1..20: note = spacer sequence
  source 1..20: mol_type = other RNA
gaataagtcactggcaaaga

SEQ ID NO: 12203 - RNA, 20 nt, synthetic construct
  misc_feature 1..20: note = spacer sequence
  source 1..20: mol_type = other RNA
gacctaagctagttaggcac

SEQ ID NO: 12204 - RNA, 20 nt, synthetic construct
  misc_feature 1..20: note = spacer sequence
  source 1..20: mol_type = other RNA
gattttctgaataagtcact

SEQ ID NO: 12205 - RNA, 20 nt, synthetic construct
  misc_feature 1..20: note = spacer sequence
  source 1..20: mol_type = other RNA
gacctcgggggttggttcag

SEQ ID NO: 12206 - RNA, 20 nt, synthetic construct
  misc_feature 1..20: note = spacer sequence
  source 1..20: mol_type = other RNA
gaggcatgccatgtgcctaa

SEQ ID NO: 12207 - RNA, 20 nt, synthetic construct
  misc_feature 1..20: note = spacer sequence
  source 1..20: mol_type = other RNA
ggggttggttcaggagctca

SEQ ID NO: 12208 - RNA, 20 nt, synthetic construct
  misc_feature 1..20: note = spacer sequence
  source 1..20: mol_type = other RNA
ggagctcaggagtaggcatc

SEQ ID NO: 12209 - RNA, 20 nt, synthetic construct
  misc_feature 1..20: note = spacer sequence
  source 1..20: mol_type = other RNA
tgaaccaacccccgaggtca

SEQ ID NO: 12210 - RNA, 20 nt, synthetic construct
  misc_feature 1..20: note = spacer sequence
  source 1..20: mol_type = other RNA
ggagtaggcatctgacacac

SEQ ID NO: 12211 - RNA, 20 nt, synthetic construct
  misc_feature 1..20: note = spacer sequence
  source 1..20: mol_type = other RNA
tgagctcctgaaccaacccc

SEQ ID NO: 12212 - RNA, 20 nt, synthetic construct
  misc_feature 1..20: note = spacer sequence
  source 1..20: mol_type = other RNA
gacacactttggtctaatga

SEQ ID NO: 12213 - RNA, 20 nt, synthetic construct
  misc_feature 1..20: note = spacer sequence
  source 1..20: mol_type = other RNA
gatgcctactcctgagctcc

SEQ ID NO: 12214 - RNA, 20 nt, synthetic construct
  misc_feature 1..20: note = spacer sequence
  source 1..20: mol_type = other RNA
aatgagatgcaagatgacat

SEQ ID NO: 12215 - RNA, 20 nt, synthetic construct
  misc_feature 1..20: note = spacer sequence
  source 1..20: mol_type = other RNA
ttagaccaaagtgtgtcaga

SEQ ID NO: 12216 - RNA, 20 nt, synthetic construct
  misc_feature 1..20: note = spacer sequence
  source 1..20: mol_type = other RNA
cattagaccaaagtgtgtca

SEQ ID NO: 12217 - RNA, 20 nt, synthetic construct
  misc_feature 1..20: note = spacer sequence
  source 1..20: mol_type = other RNA
tgcatctcattagaccaaag

SEQ ID NO: 12218 - RNA, 20 nt, synthetic construct
  misc_feature 1..20: note = spacer sequence
  source 1..20: mol_type = other RNA
tcttgcatctcattagacca

SEQ ID NO: 12219 - RNA, 20 nt, synthetic construct
  misc_feature 1..20: note = spacer sequence
  source 1..20: mol_type = other RNA
gggagattctggggaaaagt

SEQ ID NO: 12220 - RNA, 20 nt, synthetic construct
  misc_feature 1..20: note = spacer sequence
  source 1..20: mol_type = other RNA
cagaacatgtcatcttgcat

SEQ ID NO: 12221 - RNA, 20 nt, synthetic construct
  misc_feature 1..20: note = spacer sequence
  source 1..20: mol_type = other RNA
cccagaacatgtcatcttgc

SEQ ID NO: 12222 - RNA, 20 nt, synthetic construct
  misc_feature 1..20: note = spacer sequence
  source 1..20: mol_type = other RNA
ggggaaaagtttctcatgtt

SEQ ID NO: 12223 - RNA, 20 nt, synthetic construct
  misc_feature 1..20: note = spacer sequence
  source 1..20: mol_type = other RNA
ccagaatctcccagaacatg

SEQ ID NO: 12224 - RNA, 20 nt, synthetic construct
  misc_feature 1..20: note = spacer sequence
  source 1..20: mol_type = other RNA
catgttccagagagccagag

SEQ ID NO: 12225 - RNA, 20 nt, synthetic construct
  misc_feature 1..20: note = spacer sequence
  source 1..20: mol_type = other RNA
tgttccagagagccagagaa

SEQ ID NO: 12226 - RNA, 20 nt, synthetic construct
  misc_feature 1..20: note = spacer sequence
  source 1..20: mol_type = other RNA
agagagccagagaaagacaa

SEQ ID NO: 12227 - RNA, 20 nt, synthetic construct
  misc_feature 1..20: note = spacer sequence
  source 1..20: mol_type = other RNA
ggaacatgagaaacttttcc

SEQ ID NO: 12228 - RNA, 20 nt, synthetic construct
  misc_feature 1..20: note = spacer sequence
  source 1..20: mol_type = other RNA
ctggaacatgagaaactttt

SEQ ID NO: 12229 - RNA, 20 nt, synthetic construct
  misc_feature 1..20: note = spacer sequence
  source 1..20: mol_type = other RNA
ggctctctggaacatgagaa

SEQ ID NO: 12230 - RNA, 20 nt, synthetic construct
  misc_feature 1..20: note = spacer sequence
  source 1..20: mol_type = other RNA
ctggctctctggaacatgag

SEQ ID NO: 12231 - RNA, 20 nt, synthetic construct
  misc_feature 1..20: note = spacer sequence
  source 1..20: mol_type = other RNA
ttctctggctctctggaaca

SEQ ID NO: 12232 - RNA, 20 nt, synthetic construct
  misc_feature 1..20: note = spacer sequence
  source 1..20: mol_type = other RNA
tctgtacttgatccctgcag

SEQ ID NO: 12233 - RNA, 20 nt, synthetic construct
  misc_feature 1..20: note = spacer sequence
  source 1..20: mol_type = other RNA
gtacttgatccctgcaggca

SEQ ID NO: 12234 - RNA, 20 nt, synthetic construct
  misc_feature 1..20: note = spacer sequence
  source 1..20: mol_type = other RNA
agtacagaagatactattgt

SEQ ID NO: 12235 - RNA, 20 nt, synthetic construct
  misc_feature 1..20: note = spacer sequence
  source 1..20: mol_type = other RNA
ctgcaggcatcttgatagca

SEQ ID NO: 12236 - RNA, 20 nt, synthetic construct
  misc_feature 1..20: note = spacer sequence
  source 1..20: mol_type = other RNA
tgatagcaacatggagctcc

SEQ ID NO: 12237 - RNA, 20 nt, synthetic construct
  misc_feature 1..20: note = spacer sequence
  source 1..20: mol_type = other RNA
agatgcctgcagggatcaag

SEQ ID NO: 12238 - RNA, 20 nt, synthetic construct
  misc_feature 1..20: note = spacer sequence
  source 1..20: mol_type = other RNA
atgttgctatcaagatgcct

SEQ ID NO: 12239 - RNA, 20 nt, synthetic construct
  misc_feature 1..20: note = spacer sequence
  source 1..20: mol_type = other RNA
tgcaggacagcgggcagagc

SEQ ID NO: 12240 - RNA, 20 nt, synthetic construct
  misc_feature 1..20: note = spacer sequence
  source 1..20: mol_type = other RNA
tgcaggagctccatgttgct

SEQ ID NO: 12241 - RNA, 20 nt, synthetic construct
  misc_feature 1..20: note = spacer sequence
  source 1..20: mol_type = other RNA
gcccgctgtcctgcaggagc

SEQ ID NO: 12242 - RNA, 20 nt, synthetic construct
  misc_feature 1..20: note = spacer sequence
  source 1..20: mol_type = other RNA
tagctctgcccgctgtcctg

SEQ ID NO: 12243 - RNA, 20 nt, synthetic construct
  misc_feature 1..20: note = spacer sequence
  source 1..20: mol_type = other RNA
cttagctctgcccgctgtcc

SEQ ID NO: 12244 - RNA, 20 nt, synthetic construct
  misc_feature 1..20: note = spacer sequence
  source 1..20: mol_type = other RNA
tagaggaactgagctggatc

SEQ ID NO: 12245 - RNA, 20 nt, synthetic construct
  misc_feature 1..20: note = spacer sequence
  source 1..20: mol_type = other RNA
aggattctcttagctctgcc

SEQ ID NO: 12246 - RNA, 20 nt, synthetic construct
  misc_feature 1..20: note = spacer sequence
  source 1..20: mol_type = other RNA
tctaggattctcttagctct

SEQ ID NO: 12247 - RNA, 20 nt, synthetic construct
  misc_feature 1..20: note = spacer sequence
  source 1..20: mol_type = other RNA
gttcctctaggattctctta

SEQ ID NO: 12248 - RNA, 20 nt, synthetic construct
  misc_feature 1..20: note = spacer sequence
  source 1..20: mol_type = other RNA
agctcagttcctctaggatt

SEQ ID NO: 12249 - RNA, 20 nt, synthetic construct
  misc_feature 1..20: note = spacer sequence
  source 1..20: mol_type = other RNA
gctggggtttatttatgtat

SEQ ID NO: 12250 - RNA, 20 nt, synthetic construct
  misc_feature 1..20: note = spacer sequence
  source 1..20: mol_type = other RNA
aaaaaaataaaataaaataa

SEQ ID NO: 12251 - RNA, 20 nt, synthetic construct
  misc_feature 1..20: note = spacer sequence
  source 1..20: mol_type = other RNA
ctaaaaaaataaaataaaat

SEQ ID NO: 12252 - RNA, 20 nt, synthetic construct
  misc_feature 1..20: note = spacer sequence
  source 1..20: mol_type = other RNA
cactctgcccaggctggagt

SEQ ID NO: 12253 - RNA, 20 nt, synthetic construct
  misc_feature 1..20: note = spacer sequence
  source 1..20: mol_type = other RNA
ctctgcccaggctggagtgt

SEQ ID NO: 12254 - RNA, 20 nt, synthetic construct
  misc_feature 1..20: note = spacer sequence
  source 1..20: mol_type = other RNA
gcccaggctggagtgtagtg

SEQ ID NO: 12255 - RNA, 20 nt, synthetic construct
  misc_feature 1..20: note = spacer sequence
  source 1..20: mol_type = other RNA
agcctgggcagagtgagacc

SEQ ID NO: 12256 - RNA, 20 nt, synthetic construct
  misc_feature 1..20: note = spacer sequence
  source 1..20: mol_type = other RNA
actacactccagcctgggca

SEQ ID NO: 12257 - RNA, 20 nt, synthetic construct
  misc_feature 1..20: note = spacer sequence
  source 1..20: mol_type = other RNA
tagctcactgcagccccaaa

SEQ ID NO: 12258 - RNA, 20 nt, synthetic construct
  misc_feature 1..20: note = spacer sequence
  source 1..20: mol_type = other RNA
ctgcagccccaaactcctgg

SEQ ID NO: 12259 - RNA, 20 nt, synthetic construct
  misc_feature 1..20: note = spacer sequence
  source 1..20: mol_type = other RNA
tgggctcaagcgaccctctg

SEQ ID NO: 12260 - RNA, 20 nt, synthetic construct
  misc_feature 1..20: note = spacer sequence
  source 1..20: mol_type = other RNA
agcgaccctctggcctcagt

SEQ ID NO: 12261 - RNA, 20 nt, synthetic construct
  misc_feature 1..20: note = spacer sequence
  source 1..20: mol_type = other RNA
cttgagcccaggagtttggg

SEQ ID NO: 12262 - RNA, 20 nt, synthetic construct
  misc_feature 1..20: note = spacer sequence
  source 1..20: mol_type = other RNA
ggcctcagtcctttccgcct

SEQ ID NO: 12263 - RNA, 20 nt, synthetic construct
  misc_feature 1..20: note = spacer sequence
  source 1..20: mol_type = other RNA
gtcctttccgcctcagcctc

SEQ ID NO: 12264 - RNA, 20 nt, synthetic construct
  misc_feature 1..20: note = spacer sequence
  source 1..20: mol_type = other RNA
tttccgcctcagcctccgga

SEQ ID NO: 12265 - RNA, 20 nt, synthetic construct
  misc_feature 1..20: note = spacer sequence
  source 1..20: mol_type = other RNA
gcctcagcctccggaggaaa

SEQ ID NO: 12266 - RNA, 20 nt, synthetic construct
  misc_feature 1..20: note = spacer sequence
  source 1..20: mol_type = other RNA
gcctccggaggaaatgagag

SEQ ID NO: 12267 - RNA, 20 nt, synthetic construct
  misc_feature 1..20: note = spacer sequence
  source 1..20: mol_type = other RNA
ggaggaaatgagagtaatgg

SEQ ID NO: 12268 - RNA, 20 nt, synthetic construct
  misc_feature 1..20: note = spacer sequence
  source 1..20: mol_type = other RNA
ggaggctgaggcggaaagga

SEQ ID NO: 12269 - RNA, 20 nt, synthetic construct
  misc_feature 1..20: note = spacer sequence
  source 1..20: mol_type = other RNA
tccggaggctgaggcggaaa

SEQ ID NO: 12270 - RNA, 20 nt, synthetic construct
  misc_feature 1..20: note = spacer sequence
  source 1..20: mol_type = other RNA
tttcctccggaggctgaggc

SEQ ID NO: 12271 - RNA, 20 nt, synthetic construct
  misc_feature 1..20: note = spacer sequence
  source 1..20: mol_type = other RNA
catttcctccggaggctgag

SEQ ID NO: 12272 - RNA, 20 nt, synthetic construct
  misc_feature 1..20: note = spacer sequence
  source 1..20: mol_type = other RNA
cactctgctaatttttttat

SEQ ID NO: 12273 - RNA, 20 nt, synthetic construct
  misc_feature 1..20: note = spacer sequence
  source 1..20: mol_type = other RNA
gctaatttttttatttttaa

SEQ ID NO: 12274 - RNA, 20 nt, synthetic construct
  misc_feature 1..20: note = spacer sequence
  source 1..20: mol_type = other RNA
acaaaaaatttaaaaataaa

SEQ ID NO: 12275 - RNA, 20 nt, synthetic construct
  misc_feature 1..20: note = spacer sequence
  source 1..20: mol_type = other RNA
cgctttactgcccaggttgg

SEQ ID NO: 12276 - RNA, 20 nt, synthetic construct
  misc_feature 1..20: note = spacer sequence
  source 1..20: mol_type = other RNA
ctttactgcccaggttggtc

SEQ ID NO: 12277 - RNA, 20 nt, synthetic construct
  misc_feature 1..20: note = spacer sequence
  source 1..20: mol_type = other RNA
caaactcctaagctatcctc

SEQ ID NO: 12278 - RNA, 20 nt, synthetic construct
  misc_feature 1..20: note = spacer sequence
  source 1..20: mol_type = other RNA
aactcctaagctatcctcct

SEQ ID NO: 12279 - RNA, 20 nt, synthetic construct
  misc_feature 1..20: note = spacer sequence
  source 1..20: mol_type = other RNA
taagctatcctcctgccttg

SEQ ID NO: 12280 - RNA, 20 nt, synthetic construct
  misc_feature 1..20: note = spacer sequence
  source 1..20: mol_type = other RNA
tcctgccttggcttcccaaa

SEQ ID NO: 12281 - RNA, 20 nt, synthetic construct
  misc_feature 1..20: note = spacer sequence
  source 1..20: mol_type = other RNA
tgccttggcttcccaaagtg

SEQ ID NO: 12282 - RNA, 20 nt, synthetic construct
  misc_feature 1..20: note = spacer sequence
  source 1..20: mol_type = other RNA
caaagtgaggggatttacag

SEQ ID NO: 12283 - RNA, 20 nt, synthetic construct
  misc_feature 1..20: note = spacer sequence
  source 1..20: mol_type = other RNA
ctttgggaagccaaggcagg

SEQ ID NO: 12284 - RNA, 20 nt, synthetic construct
  misc_feature 1..20: note = spacer sequence
  source 1..20: mol_type = other RNA
cctcactttgggaagccaag

SEQ ID NO: 12285 - RNA, 20 nt, synthetic construct
  misc_feature 1..20: note = spacer sequence
  source 1..20: mol_type = other RNA
tgcctgtaaatcccctcact

SEQ ID NO: 12286 - RNA, 20 nt, synthetic construct
  misc_feature 1..20: note = spacer sequence
  source 1..20: mol_type = other RNA
gggtggggtggctcatgcct

SEQ ID NO: 12287 - RNA, 20 nt, synthetic construct
  misc_feature 1..20: note = spacer sequence
  source 1..20: mol_type = other RNA
agtctgggtggggtggctca

SEQ ID NO: 12288 - RNA, 20 nt, synthetic construct
  misc_feature 1..20: note = spacer sequence
  source 1..20: mol_type = other RNA
tctggtttaaaccaaccctg

SEQ ID NO: 12289 - RNA, 20 nt, synthetic construct
  misc_feature 1..20: note = spacer sequence
  source 1..20: mol_type = other RNA
ggtttaaaccaaccctgaag

SEQ ID NO: 12290 - RNA, 20 nt, synthetic construct
  misc_feature 1..20: note = spacer sequence
  source 1..20: mol_type = other RNA
gggttggtttaaaccagaag

SEQ ID NO: 12291 - RNA, 20 nt, synthetic construct
  misc_feature 1..20: note = spacer sequence
  source 1..20: mol_type = other RNA
ttcaagactcactagattta

SEQ ID NO: 12292 - RNA, 20 nt, synthetic construct
  misc_feature 1..20: note = spacer sequence
  source 1..20: mol_type = other RNA
agactcactagatttacttc

SEQ ID NO: 12293 - RNA, 20 nt, synthetic construct
  misc_feature 1..20: note = spacer sequence
  source 1..20: mol_type = other RNA
tgaaggaaggcttcagggtt

SEQ ID NO: 12294 - RNA, 20 nt, synthetic construct
  misc_feature 1..20: note = spacer sequence
  source 1..20: mol_type = other RNA
ctagatttacttctacacat

SEQ ID NO: 12295 - RNA, 20 nt, synthetic construct
  misc_feature 1..20: note = spacer sequence
  source 1..20: mol_type = other RNA
agtgagtcttgaaggaaggc

SEQ ID NO: 12296 - RNA, 20 nt, synthetic construct
  misc_feature 1..20: note = spacer sequence
  source 1..20: mol_type = other RNA
acacatttcctcattgttta

SEQ ID NO: 12297 - RNA, 20 nt, synthetic construct
  misc_feature 1..20: note = spacer sequence
  source 1..20: mol_type = other RNA
tcattgtttaagccagtttg

SEQ ID NO: 12298 - RNA, 20 nt, synthetic construct
  misc_feature 1..20: note = spacer sequence
  source 1..20: mol_type = other RNA
ttgtttaagccagtttgagt

SEQ ID NO: 12299 - RNA, 20 nt, synthetic construct
  misc_feature 1..20: note = spacer sequence
  source 1..20: mol_type = other RNA
aactggcttaaacaatgagg

SEQ ID NO: 12300 - RNA, 20 nt, synthetic construct
  misc_feature 1..20: note = spacer sequence
  source 1..20: mol_type = other RNA
aactcaaactggcttaaaca

SEQ ID NO: 12301 - RNA, 20 nt, synthetic construct
  misc_feature 1..20: note = spacer sequence
  source 1..20: mol_type = other RNA
ggtatttgtgatcgaaagca

SEQ ID NO: 12302 - RNA, 20 nt, synthetic construct
  misc_feature 1..20: note = spacer sequence
  source 1..20: mol_type = other RNA
caaataccagaaaatccaac

SEQ ID NO: 12303 - RNA, 20 nt, synthetic construct
  misc_feature 1..20: note = spacer sequence
  source 1..20: mol_type = other RNA
aaagcatcctaatttgattc

SEQ ID NO: 12304 - RNA, 20 nt, synthetic construct
  misc_feature 1..20: note = spacer sequence
  source 1..20: mol_type = other RNA
atcacaaataccagaaaatc

SEQ ID NO: 12305 - RNA, 20 nt, synthetic construct
  misc_feature 1..20: note = spacer sequence
  source 1..20: mol_type = other RNA
taatttgattccatataaaa

SEQ ID NO: 12306 - RNA, 20 nt, synthetic construct
  misc_feature 1..20: note = spacer sequence
  source 1..20: mol_type = other RNA
aattaggatgctttcgatca

SEQ ID NO: 12307 - RNA, 20 nt, synthetic construct
  misc_feature 1..20: note = spacer sequence
  source 1..20: mol_type = other RNA
atataaaatcgtctgtgttt

SEQ ID NO: 12308 - RNA, 20 nt, synthetic construct
  misc_feature 1..20: note = spacer sequence
  source 1..20: mol_type = other RNA
tctgtgtttacagctcctag

SEQ ID NO: 12309 - RNA, 20 nt, synthetic construct
  misc_feature 1..20: note = spacer sequence
  source 1..20: mol_type = other RNA
gtgtttacagctcctagtgg

SEQ ID NO: 12310 - RNA, 20 nt, synthetic construct
  misc_feature 1..20: note = spacer sequence
  source 1..20: mol_type = other RNA
tagtggcatcttccagaact

SEQ ID NO: 12311 - RNA, 20 nt, synthetic construct
  misc_feature 1..20: note = spacer sequence
  source 1..20: mol_type = other RNA
tccagaactggtattccttt

SEQ ID NO: 12312 - RNA, 20 nt, synthetic construct
  misc_feature 1..20: note = spacer sequence
  source 1..20: mol_type = other RNA
agaactggtattcctttata

SEQ ID NO: 12313 - RNA, 20 nt, synthetic construct
  misc_feature 1..20: note = spacer sequence
  source 1..20: mol_type = other RNA
ggaagatgccactaggagct

SEQ ID NO: 12314 - RNA, 20 nt, synthetic construct
  misc_feature 1..20: note = spacer sequence
  source 1..20: mol_type = other RNA
tttataataatcactactgt

SEQ ID NO: 12315 - RNA, 20 nt, synthetic construct
  misc_feature 1..20: note = spacer sequence
  source 1..20: mol_type = other RNA
catttgagatatgcaggaac

SEQ ID NO: 12316 - RNA, 20 nt, synthetic construct
  misc_feature 1..20: note = spacer sequence
  source 1..20: mol_type = other RNA
aatgtgattacgtatttgaa

SEQ ID NO: 12317 - RNA, 20 nt, synthetic construct
  misc_feature 1..20: note = spacer sequence
  source 1..20: mol_type = other RNA
caaatgtgattacgtatttg

SEQ ID NO: 12318 - RNA, 20 nt, synthetic construct
  misc_feature 1..20: note = spacer sequence
  source 1..20: mol_type = other RNA
tgcatatctcaaatgtgatt

SEQ ID NO: 12319 - RNA, 20 nt, synthetic construct
  misc_feature 1..20: note = spacer sequence
  source 1..20: mol_type = other RNA
gtagttgggaaagagggcag

SEQ ID NO: 12320 - RNA, 20 nt, synthetic construct
  misc_feature 1..20: note = spacer sequence
  source 1..20: mol_type = other RNA
caactacagagttcctgcat

SEQ ID NO: 12321 - RNA, 20 nt, synthetic construct
  misc_feature 1..20: note = spacer sequence
  source 1..20: mol_type = other RNA
ttcccaactacagagttcct

SEQ ID NO: 12322 - RNA, 20 nt, synthetic construct
  misc_feature 1..20: note = spacer sequence
  source 1..20: mol_type = other RNA
taacactgccctctttccca

SEQ ID NO: 12323 - RNA, 20 nt, synthetic construct
  misc_feature 1..20: note = spacer sequence
  source 1..20: mol_type = other RNA
caactttgtgtctcaatttg

SEQ ID NO: 12324 - RNA, 20 nt, synthetic construct
  misc_feature 1..20: note = spacer sequence
  source 1..20: mol_type = other RNA
caatttgtatggctagttcg

SEQ ID NO: 12325 - RNA, 20 nt, synthetic construct
  misc_feature 1..20: note = spacer sequence
  source 1..20: mol_type = other RNA
atttgtatggctagttcgtg

SEQ ID NO: 12326 - RNA, 20 nt, synthetic construct
  misc_feature 1..20: note = spacer sequence
  source 1..20: mol_type = other RNA
agtccaaacactgctcattt

SEQ ID NO: 12327 - RNA, 20 nt, synthetic construct
  misc_feature 1..20: note = spacer sequence
  source 1..20: mol_type = other RNA
tggtgcttactaagtgcaaa

SEQ ID NO: 12328 - RNA, 20 nt, synthetic construct
  misc_feature 1..20: note = spacer sequence
  source 1..20: mol_type = other RNA
tcccctgctactacatcatc

SEQ ID NO: 12329 - RNA, 20 nt, synthetic construct
  misc_feature 1..20: note = spacer sequence
  source 1..20: mol_type = other RNA
cctgctactacatcatcacc

SEQ ID NO: 12330 - RNA, 20 nt, synthetic construct
  misc_feature 1..20: note = spacer sequence
  source 1..20: mol_type = other RNA
ctgtgtgaaaagtaacaaca

SEQ ID NO: 12331 - RNA, 20 nt, synthetic construct
  misc_feature 1..20: note = spacer sequence
  source 1..20: mol_type = other RNA
aaatccctgtgtgaaaagta

SEQ ID NO: 12332 - RNA, 20 nt, synthetic construct
  misc_feature 1..20: note = spacer sequence
  source 1..20: mol_type = other RNA
gggttggcagaattatggcc

SEQ ID NO: 12333 - RNA, 20 nt, synthetic construct
  misc_feature 1..20: note = spacer sequence
  source 1..20: mol_type = other RNA
gccaaccctgatctaaatcc

SEQ ID NO: 12334 - RNA, 20 nt, synthetic construct
  misc_feature 1..20: note = spacer sequence
  source 1..20: mol_type = other RNA
agcccaccatctgctttcat

SEQ ID NO: 12335 - RNA, 20 nt, synthetic construct
  misc_feature 1..20: note = spacer sequence
  source 1..20: mol_type = other RNA
gctttcataaataaagtttt

SEQ ID NO: 12336 - RNA, 20 nt, synthetic construct
  misc_feature 1..20: note = spacer sequence
  source 1..20: mol_type = other RNA
taaataaagttttattggaa

SEQ ID NO: 12337 - RNA, 20 nt, synthetic construct
  misc_feature 1..20: note = spacer sequence
  source 1..20: mol_type = other RNA
aataaaactttatttatgaa

SEQ ID NO: 12338 - RNA, 20 nt, synthetic construct
  misc_feature 1..20: note = spacer sequence
  source 1..20: mol_type = other RNA
tttacatattttcatatgct

SEQ ID NO: 12339 - RNA, 20 nt, synthetic construct
  misc_feature 1..20: note = spacer sequence
  source 1..20: mol_type = other RNA
tatgctatgattggcagagt

SEQ ID NO: 12340 - RNA, 20 nt, synthetic construct
  misc_feature 1..20: note = spacer sequence
  source 1..20: mol_type = other RNA
tggctcactgcaacctctgc

SEQ ID NO: 12341 - RNA, 20 nt, synthetic construct
  misc_feature 1..20: note = spacer sequence
  source 1..20: mol_type = other RNA
ctgcaacctctgcctcccgg

SEQ ID NO: 12342 - RNA, 20 nt, synthetic construct
  misc_feature 1..20: note = spacer sequence
  source 1..20: mol_type = other RNA
gcctcccgggttcaagtgat

SEQ ID NO: 12343 - RNA, 20 nt, synthetic construct
  misc_feature 1..20: note = spacer sequence
  source 1..20: mol_type = other RNA
cgggttcaagtgatcctcct

SEQ ID NO: 12344 - RNA, 20 nt, synthetic construct
  misc_feature 1..20: note = spacer sequence
  source 1..20: mol_type = other RNA
agtgatcctcctgcctcagc

SEQ ID NO: 12345 - RNA, 20 nt, synthetic construct
  misc_feature 1..20: note = spacer sequence
  source 1..20: mol_type = other RNA
cttgaacccgggaggcagag

SEQ ID NO: 12346 - RNA, 20 nt, synthetic construct
  misc_feature 1..20: note = spacer sequence
  source 1..20: mol_type = other RNA
tcctgcctcagcctcctgag

SEQ ID NO: 12347 - RNA, 20 nt, synthetic construct
  misc_feature 1..20: note = spacer sequence
  source 1..20: mol_type = other RNA
tgcctcagcctcctgagtag

SEQ ID NO: 12348 - RNA, 20 nt, synthetic construct
  misc_feature 1..20: note = spacer sequence
  source 1..20: mol_type = other RNA
gcctcctgagtagctgggac

SEQ ID NO: 12349 - RNA, 20 nt, synthetic construct
  misc_feature 1..20: note = spacer sequence
  source 1..20: mol_type = other RNA
tgagtagctgggactacagg

SEQ ID NO: 12350 - RNA, 20 nt, synthetic construct
  misc_feature 1..20: note = spacer sequence
  source 1..20: mol_type = other RNA
ggaggctgaggcaggaggat

SEQ ID NO: 12351 - RNA, 20 nt, synthetic construct
  misc_feature 1..20: note = spacer sequence
  source 1..20: mol_type = other RNA
cagctactcaggaggctgag

SEQ ID NO: 12352 - RNA, 20 nt, synthetic construct
  misc_feature 1..20: note = spacer sequence
  source 1..20: mol_type = other RNA
tgcctggctaatttttgtat

SEQ ID NO: 12353 - RNA, 20 nt, synthetic construct
  misc_feature 1..20: note = spacer sequence
  source 1..20: mol_type = other RNA
cagcactctgggaggctgag

SEQ ID NO: 12354 - RNA, 20 nt, synthetic construct
  misc_feature 1..20: note = spacer sequence
  source 1..20: mol_type = other RNA
ataatcccagcactctggga

SEQ ID NO: 12355 - RNA, 20 nt, synthetic construct
  misc_feature 1..20: note = spacer sequence
  source 1..20: mol_type = other RNA
cgtccataatcccagcactc

SEQ ID NO: 12356 - RNA, 20 nt, synthetic construct
  misc_feature 1..20: note = spacer sequence
  source 1..20: mol_type = other RNA
gccctaagatacatattttt

SEQ ID NO: 12357 - RNA, 20 nt, synthetic construct
  misc_feature 1..20: note = spacer sequence
  source 1..20: mol_type = other RNA
tagggctgagtacggtggct

SEQ ID NO: 12358 - RNA, 20 nt, synthetic construct
  misc_feature 1..20: note = spacer sequence
  source 1..20: mol_type = other RNA
aaaaaatatgtatcttaggg

SEQ ID NO: 12359 - RNA, 20 nt, synthetic construct
  misc_feature 1..20: note = spacer sequence
  source 1..20: mol_type = other RNA
ctaaaaaatatgtatcttag

SEQ ID NO: 12360 - RNA, 20 nt, synthetic construct
  misc_feature 1..20: note = spacer sequence
  source 1..20: mol_type = other RNA
aagtatttctctaaaaaata

SEQ ID NO: 12361 - RNA, 20 nt, synthetic construct
  misc_feature 1..20: note = spacer sequence
  source 1..20: mol_type = other RNA
tgtttgaggagggaaatgag

SEQ ID NO: 12362 - RNA, 20 nt, synthetic construct
  misc_feature 1..20: note = spacer sequence
  source 1..20: mol_type = other RNA
aattgtaagtcatgtttgag

SEQ ID NO: 12363 - RNA, 20 nt, synthetic construct
  misc_feature 1..20: note = spacer sequence
  source 1..20: mol_type = other RNA
ctaattgtaagtcatgtttg

SEQ ID NO: 12364 - RNA, 20 nt, synthetic construct
  misc_feature 1..20: note = spacer sequence
  source 1..20: mol_type = other RNA
cttgcgatcaaaggagtgat

SEQ ID NO: 12365 - RNA, 20 nt, synthetic construct
  misc_feature 1..20: note = spacer sequence
  source 1..20: mol_type = other RNA
caagggacagtctctaattg

SEQ ID NO: 12366 - RNA, 20 nt, synthetic construct
  misc_feature 1..20: note = spacer sequence
  source 1..20: mol_type = other RNA
aaggagtgatttatttcccc

SEQ ID NO: 12367 - RNA, 20 nt, synthetic construct
  misc_feature 1..20: note = spacer sequence
  source 1..20: mol_type = other RNA
tttgatcgcaagggacagtc

SEQ ID NO: 12368 - RNA, 20 nt, synthetic construct
  misc_feature 1..20: note = spacer sequence
  source 1..20: mol_type = other RNA
ctcctttgatcgcaagggac

SEQ ID NO: 12369 - RNA, 20 nt, synthetic construct
  misc_feature 1..20: note = spacer sequence
  source 1..20: mol_type = other RNA
ccctgagatcagatcaaagc

SEQ ID NO: 12370 - RNA, 20 nt, synthetic construct
  misc_feature 1..20: note = spacer sequence
  source 1..20: mol_type = other RNA
gggggaaataaatcactcct

SEQ ID NO: 12371 - RNA, 20 nt, synthetic construct
  misc_feature 1..20: note = spacer sequence
  source 1..20: mol_type = other RNA
cagggggaaataaatcactc

SEQ ID NO: 12372 - RNA, 20 nt, synthetic construct
  misc_feature 1..20: note = spacer sequence
  source 1..20: mol_type = other RNA
gatcaaagccagttttggag

SEQ ID NO: 12373 - RNA, 20 nt, synthetic construct
  misc_feature 1..20: note = spacer sequence
  source 1..20: mol_type = other RNA
gatctcagggggaaataaat

SEQ ID NO: 12374 - RNA, 20 nt, synthetic construct
  misc_feature 1..20: note = spacer sequence
  source 1..20: mol_type = other RNA
aagccagttttggagcgcta

SEQ ID NO: 12375 - RNA, 20 nt, synthetic construct
  misc_feature 1..20: note = spacer sequence
  source 1..20: mol_type = other RNA
aaaactggctttgatctgat

SEQ ID NO: 12376 - RNA, 20 nt, synthetic construct
  misc_feature 1..20: note = spacer sequence
  source 1..20: mol_type = other RNA
tgtgctgtcgtccccccacc

SEQ ID NO: 12377 - RNA, 20 nt, synthetic construct
  misc_feature 1..20: note = spacer sequence
  source 1..20: mol_type = other RNA
tccccccaccagcccccatc

SEQ ID NO: 12378 - RNA, 20 nt, synthetic construct
  misc_feature 1..20: note = spacer sequence
  source 1..20: mol_type = other RNA
ccccaccagcccccatcacc

SEQ ID NO: 12379 - RNA, 20 nt, synthetic construct
  misc_feature 1..20: note = spacer sequence
  source 1..20: mol_type = other RNA
aagattaaggggggtgactt

SEQ ID NO: 12380 - RNA, 20 nt, synthetic construct
  misc_feature 1..20: note = spacer sequence
  source 1..20: mol_type = other RNA
cctaagttgatgagaaattc

SEQ ID NO: 12381 - RNA, 20 nt, synthetic construct
  misc_feature 1..20: note = spacer sequence
  source 1..20: mol_type = other RNA
taagttgatgagaaattcca

SEQ ID NO: 12382 - RNA, 20 nt, synthetic construct
  misc_feature 1..20: note = spacer sequence
  source 1..20: mol_type = other RNA
acttaggagacaaatatcca

SEQ ID NO: 12383 - RNA, 20 nt, synthetic construct
  misc_feature 1..20: note = spacer sequence
  source 1..20: mol_type = other RNA
tcaacttaggagacaaatat

SEQ ID NO: 12384 - RNA, 20 nt, synthetic construct
  misc_feature 1..20: note = spacer sequence
  source 1..20: mol_type = other RNA
catcaacttaggagacaaat

SEQ ID NO: 12385 - RNA, 20 nt, synthetic construct
  misc_feature 1..20: note = spacer sequence
  source 1..20: mol_type = other RNA
aggagaagaattgggatgga

SEQ ID NO: 12386 - RNA, 20 nt, synthetic construct
  misc_feature 1..20: note = spacer sequence
  source 1..20: mol_type = other RNA
tggaatttctcatcaactta

SEQ ID NO: 12387 - RNA, 20 nt, synthetic construct
  misc_feature 1..20: note = spacer sequence
  source 1..20: mol_type = other RNA
cctggaatttctcatcaact

SEQ ID NO: 12388 - RNA, 20 nt, synthetic construct
  misc_feature 1..20: note = spacer sequence
  source 1..20: mol_type = other RNA
tctcctggaatttctcatca

SEQ ID NO: 12389 - RNA, 20 nt, synthetic construct
  misc_feature 1..20: note = spacer sequence
  source 1..20: mol_type = other RNA
caattcttctcctggaattt

SEQ ID NO: 12390 - RNA, 20 nt, synthetic construct
  misc_feature 1..20: note = spacer sequence
  source 1..20: mol_type = other RNA
atcccaattcttctcctgga

SEQ ID NO: 12391 - RNA, 20 nt, synthetic construct
  misc_feature 1..20: note = spacer sequence
  source 1..20: mol_type = other RNA
ggtccatcccaattcttctc

SEQ ID NO: 12392 - RNA, 20 nt, synthetic construct
  misc_feature 1..20: note = spacer sequence
  source 1..20: mol_type = other RNA
attatgatttcttccctggg

SEQ ID NO: 12393 - RNA, 20 nt, synthetic construct
  misc_feature 1..20: note = spacer sequence
  source 1..20: mol_type = other RNA
taatggattgggtctggtcc

SEQ ID NO: 12394 - RNA, 20 nt, synthetic construct
  misc_feature 1..20: note = spacer sequence
  source 1..20: mol_type = other RNA
tccctgggaaaacatttcag

SEQ ID NO: 12395 - RNA, 20 nt, synthetic construct
  misc_feature 1..20: note = spacer sequence
  source 1..20: mol_type = other RNA
ctgggaaaacatttcagagc

SEQ ID NO: 12396 - RNA, 20 nt, synthetic construct
  misc_feature 1..20: note = spacer sequence
  source 1..20: mol_type = other RNA
cagggaagaaatcataatgg

SEQ ID NO: 12397 - RNA, 20 nt, synthetic construct
  misc_feature 1..20: note = spacer sequence
  source 1..20: mol_type = other RNA
gagcacatgacaagccccgc

SEQ ID NO: 12398 - RNA, 20 nt, synthetic construct
  misc_feature 1..20: note = spacer sequence
  source 1..20: mol_type = other RNA
gaaatgttttcccagggaag

SEQ ID NO: 12399 - RNA, 20 nt, synthetic construct
  misc_feature 1..20: note = spacer sequence
  source 1..20: mol_type = other RNA
tgtgctctgaaatgttttcc

SEQ ID NO: 12400 - RNA, 20 nt, synthetic construct
  misc_feature 1..20: note = spacer sequence
  source 1..20: mol_type = other RNA
cagggcctctgcctatacag

SEQ ID NO: 12401 - RNA, 20 nt, synthetic construct
  misc_feature 1..20: note = spacer sequence
  source 1..20: mol_type = other RNA
gggcctctgcctatacagat

SEQ ID NO: 12402 - RNA, 20 nt, synthetic construct
  misc_feature 1..20: note = spacer sequence
  source 1..20: mol_type = other RNA
gcctatacagatcactttga

SEQ ID NO: 12403 - RNA, 20 nt, synthetic construct
  misc_feature 1..20: note = spacer sequence
  source 1..20: mol_type = other RNA
gtataggcagaggccctgag

SEQ ID NO: 12404 - RNA, 20 nt, synthetic construct
  misc_feature 1..20: note = spacer sequence
  source 1..20: mol_type = other RNA
ctttgagcaatttgtcttta

SEQ ID NO: 12405 - RNA, 20 nt, synthetic construct
  misc_feature 1..20: note = spacer sequence
  source 1..20: mol_type = other RNA
aagtgatctgtataggcaga

SEQ ID NO: 12406 - RNA, 20 nt, synthetic construct
  misc_feature 1..20: note = spacer sequence
  source 1..20: mol_type = other RNA
ttaaagcttcttgaaatgat

SEQ ID NO: 12407 - RNA, 20 nt, synthetic construct
  misc_feature 1..20: note = spacer sequence
  source 1..20: mol_type = other RNA
tgaaatgatcctaatattct

SEQ ID NO: 12408 - RNA, 20 nt, synthetic construct
  misc_feature 1..20: note = spacer sequence
  source 1..20: mol_type = other RNA
agaagctttaaagacaaatt

SEQ ID NO: 12409 - RNA, 20 nt, synthetic construct
  misc_feature 1..20: note = spacer sequence
  source 1..20: mol_type = other RNA
tttcaagaagctttaaagac

SEQ ID NO: 12410 - RNA, 20 nt, synthetic construct
  misc_feature 1..20: note = spacer sequence
  source 1..20: mol_type = other RNA
taatattctcctgtaattct

SEQ ID NO: 12411 - RNA, 20 nt, synthetic construct
  misc_feature 1..20: note = spacer sequence
  source 1..20: mol_type = other RNA
cctgtaattctcactgctct

SEQ ID NO: 12412 - RNA, 20 nt, synthetic construct
  misc_feature 1..20: note = spacer sequence
  source 1..20: mol_type = other RNA
tgtaattctcactgctctaa

SEQ ID NO: 12413 - RNA, 20 nt, synthetic construct
  misc_feature 1..20: note = spacer sequence
  source 1..20: mol_type = other RNA
cctctagacataattcctat

SEQ ID NO: 12414 - RNA, 20 nt, synthetic construct
  misc_feature 1..20: note = spacer sequence
  source 1..20: mol_type = other RNA
tctagacataattcctatca

SEQ ID NO: 12415 - RNA, 20 nt, synthetic construct
  misc_feature 1..20: note = spacer sequence
  source 1..20: mol_type = other RNA
agacataattcctatcattt

SEQ ID NO: 12416 - RNA, 20 nt, synthetic construct
  misc_feature 1..20: note = spacer sequence
  source 1..20: mol_type = other RNA
agaggagacagattcttaga

SEQ ID NO: 12417 - RNA, 20 nt, synthetic construct
  misc_feature 1..20: note = spacer sequence
  source 1..20: mol_type = other RNA
tatcattttataatgcaatg

SEQ ID NO: 12418 - RNA, 20 nt, synthetic construct
  misc_feature 1..20: note = spacer sequence
  source 1..20: mol_type = other RNA
ttttataatgcaatgatatt

SEQ ID NO: 12419 - RNA, 20 nt, synthetic construct
  misc_feature 1..20: note = spacer sequence
  source 1..20: mol_type = other RNA
ttgcattataaaatgatagg

SEQ ID NO: 12420 - RNA, 20 nt, synthetic construct
  misc_feature 1..20: note = spacer sequence
  source 1..20: mol_type = other RNA
ttaatgtatgttactattca

SEQ ID NO: 12421 - RNA, 20 nt, synthetic construct
  misc_feature 1..20: note = spacer sequence
  source 1..20: mol_type = other RNA
gattgacagattgtatactt

SEQ ID NO: 12422 - RNA, 20 nt, synthetic construct
  misc_feature 1..20: note = spacer sequence
  source 1..20: mol_type = other RNA
gaatagtaacatacattaag

SEQ ID NO: 12423 - RNA, 20 nt, synthetic construct
  misc_feature 1..20: note = spacer sequence
  source 1..20: mol_type = other RNA
atctgaatagtaacatacat

SEQ ID NO: 12424 - RNA, 20 nt, synthetic construct
  misc_feature 1..20: note = spacer sequence
  source 1..20: mol_type = other RNA
gtcaatctgaatagtaacat

SEQ ID NO: 12425 - RNA, 20 nt, synthetic construct
  misc_feature 1..20: note = spacer sequence
  source 1..20: mol_type = other RNA
tacataataagtatacaatc

SEQ ID NO: 12426 - RNA, 20 nt, synthetic construct
  misc_feature 1..20: note = spacer sequence
  source 1..20: mol_type = other RNA
ttgacttcttttgcgaagtg

SEQ ID NO: 12427 - RNA, 20 nt, synthetic construct
  misc_feature 1..20: note = spacer sequence
  source 1..20: mol_type = other RNA
atgaaaatgtcatacataat

SEQ ID NO: 12428 - RNA, 20 nt, synthetic construct
  misc_feature 1..20: note = spacer sequence
  source 1..20: mol_type = other RNA
tttgcgaagtgacattattg

SEQ ID NO: 12429 - RNA, 20 nt, synthetic construct
  misc_feature 1..20: note = spacer sequence
  source 1..20: mol_type = other RNA
caaaagaagtcaatgaaaat

SEQ ID NO: 12430 - RNA, 20 nt, synthetic construct
  misc_feature 1..20: note = spacer sequence
  source 1..20: mol_type = other RNA
cttcgcaaaagaagtcaatg

SEQ ID NO: 12431 - RNA, 20 nt, synthetic construct
  misc_feature 1..20: note = spacer sequence
  source 1..20: mol_type = other RNA
cagcctgggaaagatttaat

SEQ ID NO: 12432 - RNA, 20 nt, synthetic construct
  misc_feature 1..20: note = spacer sequence
  source 1..20: mol_type = other RNA
caggctgggatggcaataat

SEQ ID NO: 12433 - RNA, 20 nt, synthetic construct
  misc_feature 1..20: note = spacer sequence
  source 1..20: mol_type = other RNA
ttcccaggctgggatggcaa

SEQ ID NO: 12434 - RNA, 20 nt, synthetic construct
  misc_feature 1..20: note = spacer sequence
  source 1..20: mol_type = other RNA
ggtattaaatctttcccagg

SEQ ID NO: 12435 - RNA, 20 nt, synthetic construct
  misc_feature 1..20: note = spacer sequence
  source 1..20: mol_type = other RNA
tcctccgtccatttatcaga

SEQ ID NO: 12436 - RNA, 20 nt, synthetic construct
  misc_feature 1..20: note = spacer sequence
  source 1..20: mol_type = other RNA
tccgtccatttatcagagtc

SEQ ID NO: 12437 - RNA, 20 nt, synthetic construct
  misc_feature 1..20: note = spacer sequence
  source 1..20: mol_type = other RNA
gtccatttatcagagtcatt

SEQ ID NO: 12438 - RNA, 20 nt, synthetic construct
  misc_feature 1..20: note = spacer sequence
  source 1..20: mol_type = other RNA
atttatcagagtcattcaga

SEQ ID NO: 12439 - RNA, 20 nt, synthetic construct
  misc_feature 1..20: note = spacer sequence
  source 1..20: mol_type = other RNA
gagtcattcagaactccctc

SEQ ID NO: 12440 - RNA, 20 nt, synthetic construct
  misc_feature 1..20: note = spacer sequence
  source 1..20: mol_type = other RNA
gataaatggacggaggaaga

SEQ ID NO: 12441 - RNA, 20 nt, synthetic construct
  misc_feature 1..20: note = spacer sequence
  source 1..20: mol_type = other RNA
ttcagaactccctccttttt

SEQ ID NO: 12442 - RNA, 20 nt, synthetic construct
  misc_feature 1..20: note = spacer sequence
  source 1..20: mol_type = other RNA
gaactccctcctttttccct

SEQ ID NO: 12443 - RNA, 20 nt, synthetic construct
  misc_feature 1..20: note = spacer sequence
  source 1..20: mol_type = other RNA
gaatgactctgataaatgga

SEQ ID NO: 12444 - RNA, 20 nt, synthetic construct
  misc_feature 1..20: note = spacer sequence
  source 1..20: mol_type = other RNA
ctcctttttccctcccgcct

SEQ ID NO: 12445 - RNA, 20 nt, synthetic construct
  misc_feature 1..20: note = spacer sequence
  source 1..20: mol_type = other RNA
tttttccctcccgcctcaaa

SEQ ID NO: 12446 - RNA, 20 nt, synthetic construct
  misc_feature 1..20: note = spacer sequence
  source 1..20: mol_type = other RNA
ctcccgcctcaaagtataaa

SEQ ID NO: 12447 - RNA, 20 nt, synthetic construct
  misc_feature 1..20: note = spacer sequence
  source 1..20: mol_type = other RNA
cgcctcaaagtataaattaa

SEQ ID NO: 12448 - RNA, 20 nt, synthetic construct
  misc_feature 1..20: note = spacer sequence
  source 1..20: mol_type = other RNA
aagtataaattaaaatattt

SEQ ID NO: 12449 - RNA, 20 nt, synthetic construct
  misc_feature 1..20: note = spacer sequence
  source 1..20: mol_type = other RNA
ttcaaacatatttccttgga

SEQ ID NO: 12450 - RNA, 20 nt, synthetic construct
  misc_feature 1..20: note = spacer sequence
  source 1..20: mol_type = other RNA
aacatatttccttggatatt

SEQ ID NO: 12451 - RNA, 20 nt, synthetic construct
  misc_feature 1..20: note = spacer sequence
  source 1..20: mol_type = other RNA
ttggatatttttctctagta

SEQ ID NO: 12452 - RNA, 20 nt, synthetic construct
  misc_feature 1..20: note = spacer sequence
  source 1..20: mol_type = other RNA
aaggaaatatgtttgaaaga

SEQ ID NO: 12453 - RNA, 20 nt, synthetic construct
  misc_feature 1..20: note = spacer sequence
  source 1..20: mol_type = other RNA
ctagtaatcactttgttaaa

SEQ ID NO: 12454 - RNA, 20 nt, synthetic construct
  misc_feature 1..20: note = spacer sequence
  source 1..20: mol_type = other RNA
agtaatcactttgttaaaga

SEQ ID NO: 12455 - RNA, 20 nt, synthetic construct
  misc_feature 1..20: note = spacer sequence
  source 1..20: mol_type = other RNA
ctttgttaaagagatattac

SEQ ID NO: 12456 - RNA, 20 nt, synthetic construct
  misc_feature 1..20: note = spacer sequence
  source 1..20: mol_type = other RNA
ttaacaaagtgattactaga

SEQ ID NO: 12457 - RNA, 20 nt, synthetic construct
  misc_feature 1..20: note = spacer sequence
  source 1..20: mol_type = other RNA
ctttaacaaagtgattacta

SEQ ID NO: 12458 - RNA, 20 nt, synthetic construct
  misc_feature 1..20: note = spacer sequence
  source 1..20: mol_type = other RNA
tttaggtagtaatatctctt

SEQ ID NO: 12459 - RNA, 20 nt, synthetic construct
  misc_feature 1..20: note = spacer sequence
  source 1..20: mol_type = other RNA
cgttcccagtccctgtctgc

SEQ ID NO: 12460 - RNA, 20 nt, synthetic construct
  misc_feature 1..20: note = spacer sequence
  source 1..20: mol_type = other RNA
cagtccctgtctgcatcctg

SEQ ID NO: 12461 - RNA, 20 nt, synthetic construct
  misc_feature 1..20: note = spacer sequence
  source 1..20: mol_type = other RNA
ctgtctgcatcctgatttat

SEQ ID NO: 12462 - RNA, 20 nt, synthetic construct
  misc_feature 1..20: note = spacer sequence
  source 1..20: mol_type = other RNA
gcatcctgatttatcgagat

SEQ ID NO: 12463 - RNA, 20 nt, synthetic construct
  misc_feature 1..20: note = spacer sequence
  source 1..20: mol_type = other RNA
tgatttatcgagatagctta

SEQ ID NO: 12464 - RNA, 20 nt, synthetic construct
  misc_feature 1..20: note = spacer sequence
  source 1..20: mol_type = other RNA
ggatgcagacagggactggg

SEQ ID NO: 12465 - RNA, 20 nt, synthetic construct
  misc_feature 1..20: note = spacer sequence
  source 1..20: mol_type = other RNA
agatagcttataggcatttt

SEQ ID NO: 12466 - RNA, 20 nt, synthetic construct
  misc_feature 1..20: note = spacer sequence
  source 1..20: mol_type = other RNA
ataaatcaggatgcagacag

SEQ ID NO: 12467 - RNA, 20 nt, synthetic construct
  misc_feature 1..20: note = spacer sequence
  source 1..20: mol_type = other RNA
cgataaatcaggatgcagac

SEQ ID NO: 12468 - RNA, 20 nt, synthetic construct
  misc_feature 1..20: note = spacer sequence
  source 1..20: mol_type = other RNA
actaccaaatgagaaatgat

SEQ ID NO: 12469 - RNA, 20 nt, synthetic construct
  misc_feature 1..20: note = spacer sequence
  source 1..20: mol_type = other RNA
tttggtagttgaagaaagtt

SEQ ID NO: 12470 - RNA, 20 nt, synthetic construct
  misc_feature 1..20: note = spacer sequence
  source 1..20: mol_type = other RNA
catttggtagttgaagaaag

SEQ ID NO: 12471 - RNA, 20 nt, synthetic construct
  misc_feature 1..20: note = spacer sequence
  source 1..20: mol_type = other RNA
tttctcatttggtagttgaa

SEQ ID NO: 12472 - RNA, 20 nt, synthetic construct
  misc_feature 1..20: note = spacer sequence
  source 1..20: mol_type = other RNA
gaggtgggttttccaaattt

SEQ ID NO: 12473 - RNA, 20 nt, synthetic construct
  misc_feature 1..20: note = spacer sequence
  source 1..20: mol_type = other RNA
gatcatttctcatttggtag

SEQ ID NO: 12474 - RNA, 20 nt, synthetic construct
  misc_feature 1..20: note = spacer sequence
  source 1..20: mol_type = other RNA
aaatttttatggcctgcatg

SEQ ID NO: 12475 - RNA, 20 nt, synthetic construct
  misc_feature 1..20: note = spacer sequence
  source 1..20: mol_type = other RNA
gtcacatccacaaaccatct

SEQ ID NO: 12476 - RNA, 20 nt, synthetic construct
  misc_feature 1..20: note = spacer sequence
  source 1..20: mol_type = other RNA
catccacaaaccatctgtac

SEQ ID NO: 12477 - RNA, 20 nt, synthetic construct
  misc_feature 1..20: note = spacer sequence
  source 1..20: mol_type = other RNA
acaaaccatctgtactatta

SEQ ID NO: 12478 - RNA, 20 nt, synthetic construct
  misc_feature 1..20: note = spacer sequence
  source 1..20: mol_type = other RNA
gtactattactaatttatct

SEQ ID NO: 12479 - RNA, 20 nt, synthetic construct
  misc_feature 1..20: note = spacer sequence
  source 1..20: mol_type = other RNA
taaatggagaaacttttttt

SEQ ID NO: 12480 - RNA, 20 nt, synthetic construct
  misc_feature 1..20: note = spacer sequence
  source 1..20: mol_type = other RNA
atttaagataaattagtaat

SEQ ID NO: 12481 - RNA, 20 nt, synthetic construct
  misc_feature 1..20: note = spacer sequence
  source 1..20: mol_type = other RNA
ccatttaagataaattagta

SEQ ID NO: 12482 - RNA, 20 nt, synthetic construct
  misc_feature 1..20: note = spacer sequence
  source 1..20: mol_type = other RNA
ttttttttttttttcacttt

SEQ ID NO: 12483 - RNA, 20 nt, synthetic construct
  misc_feature 1..20: note = spacer sequence
  source 1..20: mol_type = other RNA
cttttatggaagagatacat

SEQ ID NO: 12484 - RNA, 20 nt, synthetic construct
  misc_feature 1..20: note = spacer sequence
  source 1..20: mol_type = other RNA
ataaaagtgaaaaaaaaaaa

SEQ ID NO: 12485 - RNA, 20 nt, synthetic construct
  misc_feature 1..20: note = spacer sequence
  source 1..20: mol_type = other RNA
tccataaaagtgaaaaaaaa

SEQ ID NO: 12486 - RNA, 20 nt, synthetic construct
  misc_feature 1..20: note = spacer sequence
  source 1..20: mol_type = other RNA
cttccataaaagtgaaaaaa

SEQ ID NO: 12487 - RNA, 20 nt, synthetic construct
  misc_feature 1..20: note = spacer sequence
  source 1..20: mol_type = other RNA
gtaacctttgccctatgtat

SEQ ID NO: 12488 - RNA, 20 nt, synthetic construct
  misc_feature 1..20: note = spacer sequence
  source 1..20: mol_type = other RNA
cccttctgtaacctttgccc

SEQ ID NO: 12489 - RNA, 20 nt, synthetic construct
  misc_feature 1..20: note = spacer sequence
  source 1..20: mol_type = other RNA
gtgtcccccttctgtaacct

SEQ ID NO: 12490 - RNA, 20 nt, synthetic construct
  misc_feature 1..20: note = spacer sequence
  source 1..20: mol_type = other RNA
aagacctttctaggtacacc

SEQ ID NO: 12491 - RNA, 20 nt, synthetic construct
  misc_feature 1..20: note = spacer sequence
  source 1..20: mol_type = other RNA
tggaagctctgtgtccccct

SEQ ID NO: 12492 - RNA, 20 nt, synthetic construct
  misc_feature 1..20: note = spacer sequence
  source 1..20: mol_type = other RNA
aggtacaccaccctcccggc

SEQ ID NO: 12493 - RNA, 20 nt, synthetic construct
  misc_feature 1..20: note = spacer sequence
  source 1..20: mol_type = other RNA
cggcatctcatattcaccaa

SEQ ID NO: 12494 - RNA, 20 nt, synthetic construct
  misc_feature 1..20: note = spacer sequence
  source 1..20: mol_type = other RNA
catattcaccaatctggaag

SEQ ID NO: 12495 - RNA, 20 nt, synthetic construct
  misc_feature 1..20: note = spacer sequence
  source 1..20: mol_type = other RNA
tattcaccaatctggaagtt

SEQ ID NO: 12496 - protein, 57 aa, unidentified
  REGION 1..57: note = chloroplast transit peptide
MASSVLSSAAVATRSNVAQANMVAPFTGLKSAASFPVSRKQNLDITSIASNGGRVQC
